(19) United States
(12) Patent Application Publication
(10) Pub. No.: US 2020/0165309 A1
(43) Pub. Date: May 28, 2020

(54) ANTIMICROBIAL PEPTIDES WITH ALPHA-CORE HELICES

(71) Applicant: Los Angeles Biomedical Research Institute at Flarbor-UCLA Medical Center, Torrance, CA (US)

(72) Inventors: Nannette Y. Yount, San Juan Capistrano, CA (US); Michael R. Yeaman, Redondo Beach, CA (US)

(21) Appl. No.: 16/612,242

(22) PCT Filed: May 10, 2018
(86) PCT No.: PCT/US2018/032133

§ 371 Date: Nov. 8, 2019

Related U.S. Application Data
(60) Provisional application No. 62/505,013, filed on May 11, 2017.

(51) Int. Cl. C07K 14/47; C07K 14/435; C07K 14/46; C07K 14/465; G16B 15/20

(52) U.S. Cl. CPC C07K 14/4723; C07K 14/43518; C07K 14/43522; C07K 14/43568; G16B 15/20; C07K 14/43581; C07K 14/463; C07K 14/465; C07K 14/43572

(57) ABSTRACT

The present disclosure describes the identification of a consensus formula representing α-helical antimicrobial peptides (AHAPs) from broad classes of higher eukaryotes. Further provided are microbicidal peptides, compositions, methods, and uses, and computer systems and methods for identifying consensus formulae and for searching microbicidal peptides. In some embodiments, the peptide or fusion peptide includes one or more non-natural amino acid residues. Also provided is a composition comprising the α-helical antimicrobial peptide or the fusion peptide, and a pharmaceutically acceptable carrier. Also provided is a method of treating an infection in a patient in need thereof, comprising administering to the patient an effective amount of a composition comprising an α-helical antimicrobial peptide.

### CROSS REFERENCE TO RELATED APPLICATIONS

[0001] This application claims the benefit under 35 U.S.C. § 119(e) of U.S. Provisional Application Ser. No. 62/505,013, filed May 11, 2017, the content of which is incorporated by reference in its entirety into the present disclosure.

### SEQUENCE LISTING

[0002] The instant application contains a Sequence Listing which has been submitted in ASCII format via EFS-Web and is hereby incorporated by reference in its entirety. Said ASCII copy, created on May 9, 2018, is named 254302WO_ST25.txt and is 2,033,153 bytes in size.

### BACKGROUND

[0003] Antimicrobial host defense peptides (AHDPs) are an evolutionarily ancient arm of host defense that first arose in prokaryotes as a means to neutralize microbial competitors. Subsequently, similar peptides evolved in all classes of eukaryotes where they continue to act as a first line of defense against microbial invaders. AHDPs from nearly all organisms are typically small in size, cationic and amphipathic, properties that are thought to be essential for their microbicidal activities. Cationicity is thought to confer selectivity towards microorganisms, given their relatively electronegative surface charge and membrane potential. Amphipathicity has been shown to be an important feature by which AHDPs can successfully associate with and permeabilize target microbial membranes.

[0004] Given that eukaryotic AHDPs act on rapidly-evolving bacterial targets, they must necessarily react in kind to retain their potency. This host-microbe arms race has led to positive selective pressure allowing for a very high degree of mutational tolerance within AHAPs, which have been shown to be some of the most rapidly evolving sequences studied to date. When compounded over an evolutionary time scale, this process has generated an exceptionally diverse repertoire of eukaryotic sequences and structures capable of exerting microbicidal effects.

[0005] The inherent diversity in eukaryotic AHDPs has made the identification of common microbicidal motifs and SARs elusive. While a number of research groups have utilized computational and/or QSAR methods in an attempt to characterize such motifs, they have largely been focused on identifying improved drug candidates. As a result, while these investigations have identified numerous optimized or improved peptide-based therapeutics, the unifying physicochemical and three-dimensional features that confer microbicidal activity to native peptides have yet to be fully defined.

### SUMMARY

[0006] The present disclosure describes the identification of a consensus formula representing α-helical antimicrobial peptides (AHAPs) from broad classes of higher eukaryotes. When this formula is applied as a component of a logical search method against proteomic databases, it consistently retrieves a majority of the known AHAP families. Furthermore, this consensus formula helped identify a number of putative novel microbicidal peptides, as well as covert antimicrobial activities within proteins for which no such activity has yet been assigned. In accordance with one embodiment of the present disclosure, therefore, provided are microbicidal peptides, compositions, methods, and uses, and computer systems and methods for identifying consensus formulae and for searching microbicidal peptides.

[0007] In one embodiment, the present disclosure provides a peptide comprising an amino acid sequence selected from the group consisting of SEQ ID NO: 1-14, and an amino acid derived from anyone of SEQ ID NO: 1-14 with one amino acid substitution, wherein the peptide is not longer than 100 amino acid residues in length.

[0008] In some embodiments, the peptide has antimicrobial activity. In some embodiments, the peptide comprises the amino acid sequence of anyone of SEQ ID NO: 1-14. In some embodiments, the peptide comprises the amino acid sequence of SEQ ID NO: 13 or 14.

[0009] In some embodiments, the peptide is not longer than 75 amino acid residues in length. In some embodiments, the peptide is not longer than 60 amino acid residues in length.

[0010] Also provided, in some embodiments, is a peptide comprising an amino acid sequence of SEQ ID NO:19-6860 or an amino acid derived from a sequence of SEQ ID NO:19-6860 with one amino acid substitution, wherein the peptide is not longer than 100 amino acid residues in length.

[0011] Also provided, in some embodiments, is a fusion peptide comprising a first fragment selected from the sequences of SEQ ID NO:19-6860 or an amino acid derived from a sequence of SEQ ID NO:19-6860 with one amino acid substitution, and a second fragment having antimicrobial activity, wherein the fusion peptide is not longer than 100 amino acid residues in length. In some embodiments, the second fragment comprises a gamma-core motif comprising two anti-parallel β-sheets interposed by a short turn region with a GXC or CXG sequence pattern integrated into one of the β-sheets. In some embodiments, the gamma-core motif comprises CPTAQLIATLKNGRKICLDLQ (SEQ ID NO: 15) or a first amino acid sequence having at least 85% sequence identity to SEQ ID NO: 15.

[0012] In some embodiments, the peptide or fusion peptide includes one or more non-natural amino acid residues.

[0013] Also provided, in one embodiment, is a composition comprising the peptide or the fusion peptide and a pharmaceutically acceptable carrier. In some embodiments, the composition further comprises an antimicrobial agent. In some embodiments, the antimicrobial agent is selected from the group consisting of imipenem, ceftazidime, colistin, chloroquine, artemisinin, vancomycin and daptomycin.

[0014] Also provided, is one embodiment, is a method of treating an infection in a patient in need thereof, comprising administering to the patient an effective amount of the composition. In some embodiments, the infection is caused by a Gram-negative bacterium, a Gram-positive bacterium or a fungus.

[0015] Computer-implemented methods are also provided. In one embodiment, a method of identifying a peptide having antimicrobial activity is provided, comprising: identifying a consensus formula from aligned amino acid sequences known to have an antimicrobial activity; tuning the consensus formula with a test search against a plurality of proteins with known antimicrobial activity; and searching in a protein database, with one or more processors, for amino acid fragments matching the consensus formula, wherein the search takes as input one or more criteria selected from the group consisting of location of the fragment in a protein, size of the protein, organism of the protein, and signal peptide of the protein.

[0016] In some embodiments, the tuning comprising shortening the length of the consensus formula or changing substation options at one or more amino acid residues.

[0017] In another embodiment, a computer-implemented method of identifying an α-helical antimicrobial peptide is provided, comprising: searching in a protein database, with one or more processors, for amino acid fragments matching a consensus formula: X-[VILMCFWYAG]-[KRHEDNQSTAG]-[KRHEDNQSTAG]-[VILMCFWYAG]-[VILMCFWYAG]-[KRHEDNQSTAG]-[KRHEDNQSTAG]-[VILMCFWYAG]-X-[KRHEDNQSTAG]-[VILMCFWYAG], wherein X denotes any amino acid residue; filtering the searched fragments based on presence of a signal peptide in the respective protein; and evaluating the searched fragments for one or more criteria selected from the group consisting of: hydrophobic moment; mean hydrophobicity; net charge; frequencies or ratio of K and R; and isoelectric point.

### BRIEF DESCRIPTION OF THE DRAWINGS

[0018] Certain features of various embodiments of the present technology are set forth with particularity in the appended claims. A better understanding of the features and advantages of the technology will be obtained by reference to the following detailed description that sets forth illustrative embodiments, in which the principles of the technology are utilized, and the accompanying drawings of which:

[0019] FIGS. 1A and 1B show graphic representations of α-core sequence formula. 1A. Helical wheel depiction of the 18 residue α-core sequence formula. 1B. Schematic representing linear formula. Hydrophobic residues (F, W, Y, V, I, L, M, C, A, G) are in various shades of green, with greater hydrophobicity indicated by increasingly darker hues. Hydrophilic residues (K, R, H, E, D, N, Q, S, T, A, G) are represented by: blue—cationic; red—anionic; orange—uncharged polar. Alanine (light green) and glycine (yellow) are included with both hydrophilic and hydrophobic groups. H—hydrophobic; P—polar.

[0020] FIG. 2 shows the alignment of prototypic AHAPs with α-core sequence formula. 18 initiation points for the scanning iterative α-core formula are shown, representing the process by which the ProSite pattern search tool was utilized to query the SwissProt database. Coloration is as per FIG. 1A-1B.

[0021] FIG. 3 illustrates the iterative optimization of the α-core formula. Iterative refinement of the α-core formula was carried out to assess the requirement for glycine and/or alanine as a component of either the polar (hydrophilic) or non-polar (hydrophobic) residue set. Percentage of returned sequences from a control AHAP dataset of more than 400 peptides are shown.

[0022] FIG. 4 illustrates a process of identifying new AHAP sequences.

[0023] FIG. 5 shows the positional and spatial amphipathic residue frequency by class. Percentages of individual residues on either the polar or non-polar peptide face of study peptides are represented as various color blocks. Residues above the x-axis are found on the polar face of retrieved peptides and residues below the axis are found on the non-polar face. Panel A. Arthropods. Panel B. Amphibians. Panel C. Higher Vertebrates.

[0024] FIG. 6 shows the comparison of N_{K}/N_{K}+N_{K} ratio and hydrophobicity in AHAP and toxin helices. Percentage of lysine (N_{K}) relative to arginine (N_{R}) expressed as (N_{K}/N_{K}+N_{K}) versus hydrophobicity (H) in study AHAPs and toxins. Preference of lysine as compared to arginine is reflected in an increased value of H for peptides capable of generating NGC in membranes as predicted by the saddle-splay rule.

[0025] FIG. 7 shows the mapping of net charge vs. hydrophobic moment in study peptides. Values for net charge (Q) versus hydrophobic moment (μH) are shown for the retrieved peptide dataset. All retrieved sequences are shown in gray. Peptide groups selected for further characterization are shown in color. For comparison, prototypic AHAPs are shown in pink.

[0026] FIG. 8 shows helical wheel depiction of study test peptides. Hydrophobic moment (μH) and vector angle direction are indicated. Coloration: cationic full charge (KR)—blue, partial charge (H)—light blue; anionic—red; polar—yellow; tiny—gray; polar (NQ)—pink, (TS)—purple.

[0027] FIG. 9 shows the antimicrobial activity of study test peptides. Microbicidal activity of study test peptides versus a panel of prototypic gram-positive (S. aureus), gram-negative (S. typhimurium, P. aeruginosa, A. baumannii) and fungal (C. albicans) pathogens at two pH's representing native physiologic (pH 7.5) or phagolysosomal (pH 5.5) environments.

[0028] FIG. 10 illustrates an example process flow chart of a method, according to some implementations.

[0029] FIG. 11 illustrates a block diagram of an example computer system in which any of the implementations described herein may be implemented.

### DETAILED DESCRIPTION

[0030] It is to be understood that this disclosure is not limited to particular embodiments described, as such may, of course, vary. It is also to be understood that the terminology used herein is for the purpose of describing particular embodiments only, and is not intended to be limiting, since the scope of the present disclosure will be limited only by the appended claims.

[0031] It must be noted that as used herein and in the appended claims, the singular forms “a”, “an”, and “the” include plural referents unless the context clearly dictates otherwise. Thus, for example, reference to “a peptide” includes a plurality of peptides.

### 1. Definitions

[0032] Unless defined otherwise, all technical and scientific terms used herein have the same meaning as commonly understood by one of ordinary skill in the art to which this disclosure belongs. As used herein the following terms have the following meanings.

[0033] As used herein, the term “comprising” or “comprises” is intended to mean that the compositions and methods include the recited elements, but not excluding others. “Consisting essentially of” when used to define compositions and methods, shall mean excluding other elements of any essential significance to the combination for the stated purpose. Thus, a composition consisting essentially of the elements as defined herein would not exclude other materials or steps that do not materially affect the basic and novel characteristic(s) claimed. “Consisting of” shall mean excluding more than trace elements of other ingredients and substantial method steps. Embodiments defined by each of these transition terms are within the scope of this disclosure.

[0034] The term “about” when used before a numerical designation, e.g., temperature, time, amount, and concentration, including range, indicates approximations which may vary by (+) or (−) 10%, 5% or 1%.

[0035] As used herein, the term “sequence identity” refers to a level of amino acid residue or nucleotide identity between two peptides or between two nucleic acid molecules. When a position in the compared sequence is occupied by the same base or amino acid, then the molecules are identical at that position. A peptide (or a polypeptide or peptide region) has a certain percentage (for example, at least about 60%, or at least about 65%, or at least about 70%, or at least about 75%, or at least about 80%, or at least about 83%, or at least about 85%, or at least about 90%, or at least about 95%, or at least about 98% or at least about 99%) of “sequence identity” to another sequence means that, when aligned, that percentage of bases (or amino acids) are the same in comparing the two sequences. It is noted that, for any sequence (“reference sequence”) disclosed in this application, sequences having at least about 60%, or at least about 65%, or at least about 70%, or at least about 75%, or at least about 80%, or at least about 83%, or at least about 85%, or at least about 90%, or at least about 95%, or at least about 98% or at least about 99% sequence identity to the reference sequence are also within the disclosure.

[0036] Likewise, the present disclosure also includes sequences that have one, two, three, four, or five substitution, deletion or addition of amino acid residues or nucleotides as compared to the reference sequences.

[0037] In any of the embodiments described herein, analogs of a peptide comprising any amino acid sequence described herein are also provided, which have at least about 80%, or at least about 83%, or at least about 85%, or at least about 90%, or at least about 95%, or at least about 98%, or at least about 99% sequence identity to any of reference amino acid sequences. In some embodiments, the analogs include one, two, three, four, or five substitution, deletion or addition of amino acid residues as compared to the reference sequences. In some embodiments, the substitution is a conservative substitution.

[0038] As used herein the term “amino acid” refers to either natural and/or unnatural or synthetic amino acids, including glycine and both the D and L optical isomers, amino acid analogs and peptidomimetics. In some embodiments, non-natural amino acids are useful for tuning or engineering the helix or other secondary or tertiary structures of a peptide or protein for desired antimicrobial properties.

[0039] As is well-known in the art, a “conservative substitution” of an amino acid or a “conservative substitution variant” of a peptide refers to an amino acid substitution which maintains: 1) the secondary structure of the peptide; 2) the charge or hydrophobicity of the amino acid; and 3) the bulkiness of the side chain or any one or more of these characteristics. Illustratively, the well-known terminologies “hydrophilic residues” relate to serine or threonine. “Hydrophobic residues” refer to leucine, isoleucine, phenylalanine, valine or alanine, or the like. “Positively charged residues” relate to lysine, arginine, ornithine, or histidine. “Negatively charged residues” refer to aspartic acid or glutamic acid. Residues having “bulky side chains” refer to phenylalanine, tryptophan or tyrosine, or the like. A list of illustrative conservative amino acid substitutions is given in Table A.

TABLE A

| For Amino Acid | Replace With |
|---|---|
| Alanine | D-Ala, Gly, Aib, β-Ala, L-Cys, D-Cys |
| Arginine | D-Arg, Lys, D-Lys, Orn D-Orn |
| Asparagine | D-Asn, Asp, D-Asp, Glu, D-Glu Gln, D-Gln |
| Aspartic Acid | D-Asp, D-Asn, Asn, Glu, D-Glu, Gln, D-Gln |
| Cysteine | D-Cys, S-Me-Cys, Met, D-Met, Thr, |
| | D-Thr, L-Ser, D-Ser |
| Glutamine | D-Gln, Asn, D-Asn, Glu, D-Glu, Asp, D-Asp |
| Glutamic Acid | D-Glu, D-Asp, Asp, Asn, D-Asn, Gln, D-Gln |
| Glycine | Ala, D-Ala, Pro, D-Pro, Aib, β-Ala |
| Isoleucine | D-Ile, Val, D-Val, Leu, D-Leu, Met, D-Met |
| Leucine | Val, D-Val, Met, D-Met, D-Ile, D-Leu, Ile |
| Lysine | D-Lys, Arg, D-Arg, Orn, D-Orn |
| Methionine | D-Met, S-Me-Cys, Ile, D-Ile, Leu, D-Leu, Val, D-Val |
| Phenylalanine | D-Phe, Tyr, D-Tyr, His, D-His, Trp, D-Trp |
| Proline | D-Pro |
| Serine | D-Ser, Thr, D-Thr, allo-Thr, L-Cys, D-Cys |
| Threonine | D-Thr, Ser, D-Ser, allo-Thr, Met, D-Met, Val, D-Val |
| Tyrosine | D-Tyr, Phe, D-Phe, His, D-His, Trp, D-Trp |
| Valine | D-Val, Leu, D-Leu, Ile, D-Ile, Met, D-Met |

[0040] Alternatively, non-limiting examples of conservative amino acid substitutions are provided in Table B below, where a similarity score of 0 or higher indicates conservative substitution between the two amino acids.

TABLE B

| | C | G | P | S | A | T | D | E | N | Q | H | K | R | V | M | I | L | F | Y | W |
|---|---|---|---|---|---|---|---|---|---|---|---|---|---|---|---|---|---|---|---|---|
| W | −8 | −7 | −6 | −2 | −6 | −5 | −7 | −7 | −4 | −5 | −3 | −3 | 2 | −6 | −4 | −5 | −2 | 0 | 0 | 17 |
| Y | 0 | −5 | −5 | −3 | −3 | −3 | −4 | −4 | −2 | −4 | 0 | −4 | −5 | −2 | −2 | −1 | −1 | 7 | 10 | |
| F | −4 | −5 | −5 | −3 | −4 | −3 | −6 | −5 | −4 | −5 | −2 | −5 | −4 | −1 | 0 | 1 | 2 | 9 | | |
| L | −6 | −4 | −3 | −3 | −2 | −2 | −4 | −3 | −3 | −2 | −2 | −3 | −3 | 2 | 4 | 2 | 6 | | | |
| I | −2 | −3 | −2 | −1 | −1 | 0 | −2 | −2 | −2 | −2 | −2 | −2 | −2 | 4 | 2 | 5 | | | | |
| M | −5 | −3 | −2 | −2 | −1 | −1 | −3 | −2 | 0 | −1 | −2 | 0 | 0 | 2 | 6 | | | | | |
| V | −2 | −1 | −1 | −1 | 0 | 0 | −2 | −2 | −2 | −2 | −2 | −2 | −2 | 4 | | | | | | |
| R | −4 | −3 | 0 | 0 | −2 | −1 | −1 | −1 | 0 | 1 | 2 | 3 | 6 | | | | | | | |
| K | −5 | −2 | −1 | 0 | −1 | 0 | 0 | 0 | 1 | 1 | 0 | 5 | | | | | | | | |
| H | −3 | −2 | 0 | −1 | −1 | −1 | 1 | 1 | 2 | 3 | 6 | | | | | | | | | |
| Q | −5 | −1 | 0 | −1 | 0 | −1 | 2 | 2 | 1 | 4 | | | | | | | | | | |
| N | −4 | 0 | −1 | 1 | 0 | 0 | 2 | 1 | 2 | | | | | | | | | | | |
| E | −5 | 0 | −1 | 0 | 0 | 0 | 3 | 4 | | | | | | | | | | | | |
| D | −5 | 1 | −1 | 0 | 0 | 0 | 4 | | | | | | | | | | | | | |
| T | −2 | 0 | 0 | 1 | 1 | 3 | | | | | | | | | | | | | | |
| A | −2 | 1 | 1 | 1 | 2 | | | | | | | | | | | | | | | |
| S | 0 | 1 | 1 | 1 | | | | | | | | | | | | | | | | |
| P | −3 | −1 | 6 | | | | | | | | | | | | | | | | | |
| G | −3 | 5 | | | | | | | | | | | | | | | | | | |
| C | 12 | | | | | | | | | | | | | | | | | | | |

[0041] Alternatively, non-limiting examples of conservative amino acid substitutions include substitutions of a polar amino acid with a different polar amino acid, or substitutions of a hydrophobic amino acid with a different hydrophobic amino acid, as illustrated in Table C below. Each of the polar amino acids or hydrophobic amino acids, in some embodiments, can be substituted with Ala or Gly.

TABLE C

| | |
|---|---|
| Polar amino acids | K, R, H, E, D, N, Q, S, T |
| | (or substituted with A or G) |
| Hydrophobic amino | V, I, L, M, C, F, W, Y |
| acids | (or substituted with A or G) |

[0042] As used herein, the term “composition” refers to a preparation suitable for administration to an intended patient for therapeutic purposes that contains at least one pharmaceutically active ingredient, including any solid form thereof. The composition may include at least one pharmaceutically acceptable component to provide an improved formulation of the compound, such as a suitable carrier. In certain embodiments, the composition is formulated as a film, gel, patch, or liquid solution.

[0043] As used herein, the term “pharmaceutically acceptable” indicates that the indicated material does not have properties that would cause a reasonably prudent medical practitioner to avoid administration of the material to a patient, taking into consideration the disease or conditions to be treated and the respective route of administration. For example, it is commonly required that such a material be essentially sterile.

### 2. Antimicrobial α-Helical Antimicrobial Peptides

[0044] The present disclosure, in some embodiments, describes a computational approach for generating a systemic formula from known α-helical antimicrobial peptides and using the formula to screen for new α-helical antimicrobial peptides. The systematic formula integrates features of idealized amphipathic and/or antimicrobial helices spanning up to 18 positions of canonical right-handed α-helices. Results demonstrate that nearly all families of known antimicrobial α-helical peptides align with the formula. In addition, many previously uncharacterized sequences were predicted to have direct antimicrobial activity. Synthesis of selected candidates and in vitro efficacy against human pathogens affirmed the veracity of model predictions and established validity of the α-core formula and search strategy. As a result, novel protein and peptide families and their specific sequences are identified as having potent and direct microbicidal efficacy that heretofore had not been ascribed.

[0045] The identified protein and peptide families and their specific sequences are provided in Tables 2-4 and SEQ ID NO:518-6860. In some embodiments, provided is an isolated peptide comprising an amino acid sequence of Table 2, 3 or 4 or any one of SEQ ID NO:518-6860, or an amino acid derived therefrom with one, two or three amino acid substitution. In some embodiments, the substitution is a conservative substitution. In some embodiments, the substitution is the replacement of a polar amino acid with a different polar amino acid (or A or G), or the replacement of a hydrophobic amino acid with a different hydrophobic amino acid (or A or G).

[0046] In some embodiments, provided is an isolated peptide comprising an amino acid sequence selected from the group consisting of SEQ ID NO: 1-14 and an amino acid derived from anyone of SEQ ID NO: 1-14 with one, two or three amino acid substitution. In some embodiments, the substitution is a conservative substitution. In some embodiments, the substitution is the replacement of a polar amino acid with a different polar amino acid (or A or G), or the replacement of a hydrophobic amino acid with a different hydrophobic amino acid (or A or G). In some embodiments, the peptide comprises the amino acid sequence of anyone of SEQ ID NO: 1-14.

[0047] In some embodiments, the peptide is a fragment or fusion peptide described from natural proteins. In some embodiments, the peptide differs from natural proteins by at least an amino acid substation, addition or deletion.

[0048] In some embodiments, the peptide is not longer than 100 amino acid residues in length. In some embodiments, the peptide is not longer than 95, 90, 85, 80, 75, 70, 65, 60, 55, 50, 45, 40, 35, 30 or 25 amino acid resides in length. In some embodiments, the peptide has antimicrobial activity.

[0049] Fusion peptides are also described. In one embodiment, the present disclosure provides a fusion peptide comprising a first fragment selected from the sequences of Table 2, 3 or 4 or any one of SEQ ID NO:518-6860 or an amino acid derived from a sequence of Table 2, or 3 or any one of SEQ ID NO:518-6860 with one, or two or three amino acid substitution, and a second fragment having antimicrobial activity. In some embodiments, the second fragment comprises a gamma-core motif comprising two anti-parallel β-sheets interposed by a short turn region with a GXC or CXG sequence pattern integrated into one of the β-sheets.

[0050] As used herein, the terms “gamma-core motif,” or “γ-core,” and equivalents thereof refer to a multidimensional protein signature, in particular a multidimensional antimicrobial signature, that is characterized by two anti-parallel β-sheets interposed by a short turn region with a conserved GXC (dextromeric) or CXG (levomeric) sequence pattern integrated into one β-sheet. Additional features that characterize the y-core motif include a hydrophobic bias toward the C-terminal aspect and cationic charge positioned at the inflection point and termini of the β-sheet domains, polarizing charge along the longitudinal axis of the γ-core.

[0051] The kinocidin γ-core (γ_{KC} core) signature is an iteration of the antimicrobial peptide γ-core (γ_{AP}), conforming to an anti-parallel β-hairpin comprised of a 13-17 amino acid pattern with a central hydrophobic region typically flanked by basic residues. The γ_{KC} core motif can be characterized by the following consensus sequence formula:

NH₂[C]—[X₁₀₋₁₃]-[GX₂₋₃C]—[X₂]—[P]COOH

[0052] Human IL-8, which contains the kinocidin γ-core (γ_{KC} core) signature, has the sequence:

NH₂ CANTEIIVKLSDGRELCLDP COOH

[0053] This fragment of the IL-8 sequence is consistent with the consensus γ_{KC}-core motif. Furthermore, many kinocidins exhibit a recurring amino acid position pattern, consistent with the consensus γ_{KC} core formula:

[chemical structure]

where Z represents the hydrophobic residues A, F, I, L, V, W, Y; B represents the charged or polar residues D, E, H, K, N, R, Q; C, P, or G correspond to cysteine, proline, or glycine, respectively, X indicates variable amino acid position; and numeric superscripts of bracketed positions indicate relative frequency in percent, with common alternate residues listed beneath.

[0054] In one embodiment, the gamma-core motif comprises CPTAQLIATLKNGRKICLDLQ (SEQ ID NO: 15) or a first amino acid sequence having at least 85% sequence identity to SEQ ID NO: 15. In one aspect, variants of the γ-core can include CPTAQLIATLKNGRKICLDLQP (SEQ ID NO: 16), CPTAQLIATLKNGRKICLDLQAP (SEQ ID NO: 17) and CPTAQLIATLKNGRKICLDLQA (SEQ ID NO: 18).

[0055] A linker can optionally be included between the first fragment and the second fragment, which is preferably 10 amino acids or fewer in length. In some aspect, the spacer is 9, 8, 6, 5, 4, 3, 2 amino acids in length or shorter. The spacer can include any amino acids, such as Ala, Pro, Cys, and Gly.

[0056] In some embodiments, the fusion peptide has antimicrobial activity. In some embodiments, the peptides may be conjugated to therapeutic agents, prodrugs, peptides, proteins, enzymes, viruses, lipids, biological response modifiers, pharmaceutical agents, or PEG.

[0057] The peptides may be conjugated or fused to a therapeutic agent, which may include detectable labels such as radioactive labels, an immunomodulator, a hormone, an enzyme, an oligonucleotide, a photoactive therapeutic or diagnostic agent, a cytotoxic agent, which may be a drug or a toxin, an ultrasound enhancing agent, a non-radioactive label, a combination thereof and other such agents known in the art. The peptides can be detectably labeled by coupling it to a chemiluminescent compound. The presence of the chemiluminescent-tagged antigen-binding polypeptide is then determined by detecting the presence of luminescence that arises during the course of a chemical reaction. Examples of particularly useful chemiluminescent labeling compounds are luminol, isoluminol, theromatic acridinium ester, imidazole, acridinium salt and oxalate ester.

### 3. Synthesis of Antimicrobial Peptides

[0058] The peptides described herein can be ordered from a commercial source or partially or fully synthesized using methods well known in the art (e.g., chemical and/or biotechnological methods). In certain embodiments, the peptides are synthesized according to solid phase peptide synthesis protocols that are well known in the art. In another embodiment, the peptide is synthesized on a solid support according to the well-known Fmoc protocol, cleaved from the support with trifluoroacetic acid and purified by chromatography according to methods known to persons skilled in the art. In other embodiments, the peptide is synthesized utilizing the methods of biotechnology that are well known to persons skilled in the art. In one embodiment, a DNA sequence that encodes the amino acid sequence information for the desired peptide is ligated by recombinant DNA techniques known to persons skilled in the art into an expression plasmid (for example, a plasmid that incorporates an affinity tag for affinity purification of the peptide), the plasmid is transfected into a host organism for expression, and the peptide is then isolated from the host organism or the growth medium, e.g., by affinity purification.

[0059] The peptides can be also prepared by using recombinant expression systems. Generally, this involves inserting the nucleic acid molecule into an expression system to which the molecule is heterologous (i.e., not normally present). One or more desired nucleic acid molecules encoding a peptide of the disclosure may be inserted into the vector. When multiple nucleic acid molecules are inserted, the multiple nucleic acid molecules may encode the same or different peptides. The heterologous nucleic acid molecule is inserted into the expression system or vector in proper sense (5′→3′) orientation relative to the promoter and any other 5′ regulatory molecules, and correct reading frame.

[0060] Purified peptides may be obtained by several methods. The peptide is preferably produced in purified form (preferably at least about 80% or 85% pure, more preferably at least about 90% or 95% pure) by conventional techniques. Depending on whether the recombinant host cell is made to secrete the peptide into growth medium (see U.S. Pat. No. 6,596,509 to Bauer et al., which is hereby incorporated by reference in its entirety), the peptide can be isolated and purified by centrifugation (to separate cellular components from supernatant containing the secreted peptide) followed by sequential ammonium sulfate precipitation of the supernatant. The fraction containing the peptide is subjected to gel filtration in an appropriately sized dextran or polyacrylamide column to separate the peptides from other proteins. If necessary, the peptide fraction may be further purified by HPLC.

### 4. Antimicrobial Compositions and Formulations

[0061] Compositions and formulations that include any one or more of the peptides as disclosed herein are also provided. In one embodiment, the composition includes any one or more of the peptides and a pharmaceutically acceptable carrier.

[0062] “Pharmaceutically acceptable carriers” refers to any diluents, excipients, or carriers that may be used in the compositions of the disclosure. Pharmaceutically acceptable carriers include ion exchangers, alumina, aluminum stearate, lecithin, serum proteins, such as human serum albumin, buffer substances, such as phosphates, glycine, sorbic acid, potassium sorbate, partial glyceride mixtures of saturated vegetable fatty acids, water, salts or electrolytes, such as protamine sulfate, disodium hydrogen phosphate, potassium hydrogen phosphate, sodium chloride, zinc salts, colloidal silica, magnesium trisilicate, polyvinyl pyrrolidone, cellulose-based substances, polyethylene glycol, sodium carboxymethylcellulose, polyacrylates, waxes, polyethylene-polyoxypropylene-block polymers, polyethylene glycol and wool fat. Suitable pharmaceutical carriers are described in Remington's Pharmaceutical Sciences, Mack Publishing Company, a standard reference text in this field. They are preferably selected with respect to the intended form of administration, that is, oral tablets, capsules, elixirs, syrups and the like, and consistent with conventional pharmaceutical practices.

[0063] The pharmaceutical compositions of the disclosure can be manufactured by methods well known in the art such as conventional granulating, mixing, dissolving, encapsulating, lyophilizing, or emulsifying processes, among others. Compositions may be produced in various forms, including granules, precipitates, or particulates, powders, including freeze dried, rotary dried or spray dried powders, amorphous powders, injections, emulsions, elixirs, suspensions or solutions. Formulations may optionally contain stabilizers, pH modifiers, surfactants, bioavailability modifiers and combinations of these.

[0064] Pharmaceutical formulations may be prepared as liquid suspensions or solutions using a sterile liquid, such as oil, water, alcohol, and combinations thereof. Pharmaceutically suitable surfactants, suspending agents or emulsifying agents, may be added for oral or parenteral administration. Suspensions may include oils, such as peanut oil, sesame oil, cottonseed oil, corn oil and olive oil. Suspension preparation may also contain esters of fatty acids, such as ethyl oleate, isopropyl myristate, fatty acid glycerides and acetylated fatty acid glycerides. Suspension formulations may include alcohols, such as ethanol, isopropyl alcohol, hexadecyl alcohol, glycerol and propylene glycol. Ethers, such as poly(ethyleneglycol), petroleum hydrocarbons, such as mineral oil and petrolatum, and water may also be used in suspension formulations.

[0065] The compositions of this disclosure are formulated for pharmaceutical administration to a mammal, preferably a human being. Such pharmaceutical compositions of the disclosure may be administered in a variety of ways, preferably parenterally.

[0066] Sterile injectable forms of the compositions of this disclosure may be aqueous or oleaginous suspension. These suspensions may be formulated according to techniques known in the art using suitable dispersing or wetting agents and suspending agents. The sterile injectable preparation may also be a sterile injectable solution or suspension in a non-toxic parenterally acceptable diluent or solvent, for example as a solution in 1,3-butanediol. Among the acceptable vehicles and solvents that may be employed are water, Ringer's solution and isotonic sodium chloride solution. In addition, sterile, fixed oils are conventionally employed as a solvent or suspending medium. For this purpose, any bland fixed oil may be employed including synthetic mono- or di-glycerides. Fatty acids, such as oleic acid and its glyceride derivatives are useful in the preparation of injectables, as are natural pharmaceutically-acceptable oils, such as olive oil or castor oil, especially in their polyoxyethylated versions. These oil solutions or suspensions may also contain a long-chain alcohol diluent or dispersant, such as carboxymethyl cellulose or similar dispersing agents which are commonly used in the formulation of pharmaceutically acceptable dosage forms including emulsions and suspensions. Other commonly used surfactants, such as Tweens, Spans and other emulsifying agents or bioavailability enhancers which are commonly used in the manufacture of pharmaceutically acceptable solid, liquid, or other dosage forms may also be used for the purposes of formulation. Compounds may be formulated for parenteral administration by injection such as by bolus injection or continuous infusion. A unit dosage form for injection may be in ampoules or in multi-dose containers.

[0067] In addition to dosage forms described above, pharmaceutically acceptable excipients and carriers and dosage forms are generally known to those skilled in the art and are included in the disclosure. It should be understood that a specific dosage and treatment regimen for any particular patient will depend upon a variety of factors, including the activity of the specific peptide employed, the age, body weight, general health, sex and diet, renal and hepatic function of the patient, and the time of administration, rate of excretion, drug combination, judgment of the treating physician or veterinarian and severity of the particular disease being treated.

[0068] In some embodiments, the composition can further include a secondary antimicrobial agent. Non-limiting examples of such agents include imipenem, ceftazidime, colistin, chloroquine, artemisinin, vancomycin and daptomycin.

### 5. Therapeutic Methods

[0069] Methods of using the peptides, compositions and formulations of the present disclosure are also described. In one embodiment, the methods are for preventing or treating an infection of a microorganism. The microorganism can be a bacterium, such as a Gram-negative bacterium or a Gram-positive bacterium, a fungus, or a parasite.

[0070] The peptides, compositions and formulations are also useful for treating a disease or condition associated with an infection, such as wound abscess, catheter biofilm, pneumonia, and bacteremia.

[0071] In some embodiments, the treatment methods further include administration, concurrently or sequentially, of a second secondary antimicrobial agent. Non-limiting examples of such agents include imipenem, ceftazidime, colistin, chloroquine, artemisinin, vancomycin and daptomycin.

[0072] The peptides, compositions and formulations of the disclosure may be administered to the systemic circulation via parental administration. The term “parenteral” as used herein includes subcutaneous, intravenous, intramuscular, intra-articular, intra-synovial, intrasternal, intrathecal, intrahepatic, intralesional and intracranial injection or infusion techniques. However, in cases where the infection is local (e.g., on the skin), the composition may be administered locally, such as topically.

### 6. Computational system and methods

[0073] The present disclosure, in some embodiments, provides computer-implemented methods for identifying antimicrobial sequences and related systems and non-transitory computer-readable media. In one embodiment, a computer-implemented method of identifying a peptide having antimicrobial activity is provided, as illustrated in FIG. 10 which is a process flow chart of a method 1000. The various processing operations and/or data flows depicted in FIG. 10 (and in the other drawing figures) are described in greater detail herein. The described operations may be accomplished using some or all of the system components described in detail above and, in some implementations, various operations may be performed in different sequences and various operations may be omitted. Additional operations may be performed along with some or all of the operations shown in the depicted flow diagrams. One or more operations may be performed simultaneously. Accordingly, the operations as illustrated (and described in greater detail below) are exemplary by nature and, as such, should not be viewed as limiting.

[0074] At step 1002, pursuant to a user command, the system, such as personal computing device, identifies a consensus formula from aligned amino acid sequences known to have an antimicrobial activity, such as those known as α-helical antimicrobial peptides. An example formula is X-[VILMCFWYAG]-[KRHEDNQSTAG]-[KRHEDNQSTAG]-[VILMCFWYAG]-[VILMCFWYAG]-[KRHEDNQSTAG]-[KRHEDNQSTAG]-[VILMCFWYAG]-X-[KRHEDNQSTAG]-[VILMCFWYAG], wherein X denotes any amino acid residue. The formula can be tested with a dataset that include known antimicrobial peptides and the formula can be further tuned (step 1004). For instance, the formula may be shortened or lengthened, or certain amino acid residues can include more or fewer substitutions.

[0075] The formula can then be used to search in a protein database (step 1006) for sequences or fragment that match the requirement of the formula. In some embodiments, the search query include one or more criteria such as location of the fragment in a protein, size of the protein, and organism of the protein (step 1008). In particular, in one embodiment, the search results are further evaluated for the presence of a signal peptide in the corresponding protein.

[0076] In some embodiments, the search results are further evaluated with respect to their biological, chemical, physical or sequential properties. Example properties include, without limitation, hydrophobic moment; mean hydrophobicity; net charge; frequencies or ratio of K and R; and isoelectric point (PI). Each of these evaluation scores can be used for prioritizing, ranking, filtering the search results (step 1012). Optionally, some of the search results are synthesized and tested in the lab for their antimicrobial activities.

[0077] FIG. 11 depicts a block diagram of an example computer system 1100 in which any of the embodiments described herein may be implemented. The computer system 1100 includes a bus 1102 or other communication mechanism for communicating information, one or more hardware processors 1104 coupled with bus 1102 for processing information. Hardware processor(s) 1104 may be, for example, one or more general purpose microprocessors.

[0078] The computer system 1100 also includes a main memory 1106, such as a random access memory (RAM), cache and/or other dynamic storage devices, coupled to bus 1102 for storing information and instructions to be executed by processor 1104. Main memory 1106 also may be used for storing temporary variables or other intermediate information during execution of instructions to be executed by processor 1104. Such instructions, when stored in storage media accessible to processor 1104, render computer system 1100 into a special-purpose machine that is customized to perform the operations specified in the instructions.

[0079] The computer system 1100 further includes a read only memory (ROM) 1108 or other static storage device coupled to bus 1102 for storing static information and instructions for processor 1104. A storage device 1110, such as a magnetic disk, optical disk, or USB thumb drive (Flash drive), etc., is provided and coupled to bus 1102 for storing information and instructions.

[0080] The computer system 1100 may be coupled via bus 1102 to a display 1112, such as a cathode ray tube (CRT) or LCD display (or touch screen), for displaying information to a computer user. An input device 1114, including alphanumeric and other keys, is coupled to bus 1102 for communicating information and command selections to processor 1104. Another type of user input device is cursor control 1116, such as a mouse, a trackball, or cursor direction keys for communicating direction information and command selections to processor 1104 and for controlling cursor movement on display 1112. This input device typically has two degrees of freedom in two axes, a first axis (e.g., x) and a second axis (e.g., y), that allows the device to specify positions in a plane. In some embodiments, the same direction information and command selections as cursor control may be implemented via receiving touches on a touch screen without a cursor.

[0081] The computing system 1100 may include a user interface module to implement a GUI that may be stored in a mass storage device as executable software codes that are executed by the computing device(s). This and other modules may include, by way of example, components, such as software components, object-oriented software components, class components and task components, processes, functions, attributes, procedures, subroutines, segments of program code, drivers, firmware, microcode, circuitry, data, databases, data structures, tables, arrays, and variables.

[0082] In general, the word “module,” as used herein, refers to logic embodied in hardware or firmware, or to a collection of software instructions, possibly having entry and exit points, written in a programming language, such as, for example, Java, C or C++. A software module may be compiled and linked into an executable program, installed in a dynamic link library, or may be written in an interpreted programming language such as, for example, BASIC, Perl, or Python. It will be appreciated that software modules may be callable from other modules or from themselves, and/or may be invoked in response to detected events or interrupts. Software modules configured for execution on computing devices may be provided on a computer readable medium, such as a compact disc, digital video disc, flash drive, magnetic disc, or any other tangible medium, or as a digital download (and may be originally stored in a compressed or installable format that requires installation, decompression or decryption prior to execution). Such software code may be stored, partially or fully, on a memory device of the executing computing device, for execution by the computing device. Software instructions may be embedded in firmware, such as an EPROM. It will be further appreciated that hardware modules may be comprised of connected logic units, such as gates and flip-flops, and/or may be comprised of programmable units, such as programmable gate arrays or processors. The modules or computing device functionality described herein are preferably implemented as software modules, but may be represented in hardware or firmware. Generally, the modules described herein refer to logical modules that may be combined with other modules or divided into sub-modules despite their physical organization or storage.

[0083] The computer system 1100 may implement the techniques described herein using customized hard-wired logic, one or more ASICs or FPGAs, firmware and/or program logic which in combination with the computer system causes or programs computer system 1100 to be a special-purpose machine. According to one embodiment, the techniques herein are performed by computer system 1100 in response to processor(s) 1104 executing one or more sequences of one or more instructions contained in main memory 1106. Such instructions may be read into main memory 1106 from another storage medium, such as storage device 1110. Execution of the sequences of instructions contained in main memory 1106 causes processor(s) 1104 to perform the process steps described herein. In alternative embodiments, hard-wired circuitry may be used in place of or in combination with software instructions.

[0084] The term “non-transitory media,” and similar terms, as used herein refers to any media that store data and/or instructions that cause a machine to operate in a specific fashion. Such non-transitory media may comprise non-volatile media and/or volatile media. Non-volatile media includes, for example, optical or magnetic disks, such as storage device 1110. Volatile media includes dynamic memory, such as main memory 1106. Common forms of non-transitory media include, for example, a floppy disk, a flexible disk, hard disk, solid state drive, magnetic tape, or any other magnetic data storage medium, a CD-ROM, any other optical data storage medium, any physical medium with patterns of holes, a RAM, a PROM, and EPROM, a FLASH-EPROM, NVRAM, any other memory chip or cartridge, and networked versions of the same.

[0085] Non-transitory media is distinct from but may be used in conjunction with transmission media. Transmission media participates in transferring information between non-transitory media. For example, transmission media includes coaxial cables, copper wire and fiber optics, including the wires that comprise bus 1102. Transmission media can also take the form of acoustic or light waves, such as those generated during radio-wave and infra-red data communications.

[0086] Various forms of media may be involved in carrying one or more sequences of one or more instructions to processor 1104 for execution. For example, the instructions may initially be carried on a magnetic disk or solid state drive of a remote computer. The remote computer can load the instructions into its dynamic memory and send the instructions over a telephone line using a modem. A modem local to computer system 1100 can receive the data on the telephone line and use an infra-red transmitter to convert the data to an infra-red signal. An infra-red detector can receive the data carried in the infra-red signal and appropriate circuitry can place the data on bus 1102. Bus 1102 carries the data to main memory 1106, from which processor 1104 retrieves and executes the instructions. The instructions received by main memory 1106 may retrieves and executes the instructions. The instructions received by main memory 1106 may optionally be stored on storage device 1110 either before or after execution by processor 1104.

[0087] The computer system 1100 also includes a communication interface 1118 coupled to bus 1102. Communication interface 1118 provides a two-way data communication coupling to one or more network links that are connected to one or more local networks. For example, communication interface 1118 may be an integrated services digital network (ISDN) card, cable modem, satellite modem, or a modem to provide a data communication connection to a corresponding type of telephone line. As another example, communication interface 1118 may be a local area network (LAN) card to provide a data communication connection to a compatible LAN (or WAN component to communicated with a WAN). Wireless links may also be implemented. In any such implementation, communication interface 1118 sends and receives electrical, electromagnetic or optical signals that carry digital data streams representing various types of information.

[0088] A network link typically provides data communication through one or more networks to other data devices. For example, a network link may provide a connection through local network to a host computer or to data equipment operated by an Internet Service Provider (ISP). The ISP in turn provides data communication services through the world wide packet data communication network now commonly referred to as the “Internet”. Local network and Internet both use electrical, electromagnetic or optical signals that carry digital data streams. The signals through the various networks and the signals on network link and through communication interface 1118, which carry the digital data to and from computer system 1100, are example forms of transmission media.

[0089] The computer system 1100 can send messages and receive data, including program code, through the network(s), network link and communication interface 1118. In the Internet example, a server might transmit a requested code for an application program through the Internet, the ISP, the local network and the communication interface 1118.

[0090] The received code may be executed by processor 1104 as it is received, and/or stored in storage device 1110, or other non-volatile storage for later execution.

[0091] Each of the processes, methods, and algorithms described in the preceding sections may be embodied in, and fully or partially automated by, code modules executed by one or more computer systems or computer processors comprising computer hardware. The processes and algorithms may be implemented partially or wholly in application-specific circuitry.

[0092] The various features and processes described above may be used independently of one another, or may be combined in various ways. All possible combinations and sub-combinations are intended to fall within the scope of this disclosure. In addition, certain method or process blocks may be omitted in some implementations. The methods and processes described herein are also not limited to any particular sequence, and the blocks or states relating thereto can be performed in other sequences that are appropriate. For example, described blocks or states may be performed in an order other than that specifically disclosed, or multiple blocks or states may be combined in a single block or state. The example blocks or states may be performed in serial, in parallel, or in some other manner. Blocks or states may be added to or removed from the disclosed example embodiments. The example systems and components described herein may be configured differently than described. For example, elements may be added to, removed from, or rearranged compared to the disclosed example embodiments.

[0093] Conditional language, such as, among others, “can,” “could,” “might,” or “may,” unless specifically stated otherwise, or otherwise understood within the context as used, is generally intended to convey that certain embodiments include, while other embodiments do not include, certain features, elements and/or steps. Thus, such conditional language is not generally intended to imply that features, elements and/or steps are in any way required for one or more embodiments or that one or more embodiments necessarily include logic for deciding, with or without user input or prompting, whether these features, elements and/or steps are included or are to be performed in any particular embodiment.

[0094] Any process descriptions, elements, or blocks in the flow diagrams described herein and/or depicted in the attached figures should be understood as potentially representing modules, segments, or portions of code which include one or more executable instructions for implementing specific logical functions or steps in the process. Alternate implementations are included within the scope of the embodiments described herein in which elements or functions may be deleted, executed out of order from that shown or discussed, including substantially concurrently or in reverse order, depending on the functionality involved, as would be understood by those skilled in the art.

[0095] It should be emphasized that many variations and modifications may be made to the above-described embodiments, the elements of which are to be understood as being among other acceptable examples. All such modifications and variations are intended to be included herein within the scope of this disclosure. The foregoing description details certain embodiments of the invention. It will be appreciated, however, that no matter how detailed the foregoing appears in text, the invention can be practiced in many ways. As is also stated above, it should be noted that the use of particular terminology when describing certain features or aspects of the invention should not be taken to imply that the terminology is being re-defined herein to be restricted to including any specific characteristics of the features or aspects of the invention with which that terminology is associated. The scope of the invention should therefore be construed in accordance with the appended claims and any equivalents thereof.

### Engines, Components, and Logic

[0096] Certain embodiments are described herein as including logic or a number of components, engines, or mechanisms. Engines may constitute either software engines (e.g., code embodied on a machine-readable medium) or hardware engines. A “hardware engine” is a tangible unit capable of performing certain operations and may be configured or arranged in a certain physical manner. In various example embodiments, one or more computer systems (e.g., a standalone computer system, a client computer system, or a server computer system) or one or more hardware engines of a computer system (e.g., a processor or a group of processors) may be configured by software (e.g., an application or application portion) as a hardware engine that operates to perform certain operations as described herein.

[0097] In some embodiments, a hardware engine may be implemented mechanically, electronically, or any suitable combination thereof. For example, a hardware engine may include dedicated circuitry or logic that is permanently configured to perform certain operations. For example, a hardware engine may be a special-purpose processor, such as a Field-Programmable Gate Array (FPGA) or an Application Specific Integrated Circuit (ASIC). A hardware engine may also include programmable logic or circuitry that is temporarily configured by software to perform certain operations. For example, a hardware engine may include software executed by a general-purpose processor or other programmable processor. Once configured by such software, hardware engines become specific machines (or specific components of a machine) uniquely tailored to perform the configured functions and are no longer general-purpose processors. It will be appreciated that the decision to implement a hardware engine mechanically, in dedicated and permanently configured circuitry, or in temporarily configured circuitry (e.g., configured by software) may be driven by cost and time considerations.

[0098] Accordingly, the phrase “hardware engine” should be understood to encompass a tangible entity, be that an entity that is physically constructed, permanently configured (e.g., hardwired), or temporarily configured (e.g., programmed) to operate in a certain manner or to perform certain operations described herein. As used herein, “hardware-implemented engine” refers to a hardware engine. Considering embodiments in which hardware engines are temporarily configured (e.g., programmed), each of the hardware engines need not be configured or instantiated at any one instance in time. For example, where a hardware engine comprises a general-purpose processor configured by software to become a special-purpose processor, the general-purpose processor may be configured as respectively different special-purpose processors (e.g., comprising different hardware engines) at different times. Software accordingly configures a particular processor or processors, for example, to constitute a particular hardware engine at one instance of time and to constitute a different hardware engine at a different instance of time.

[0099] Hardware engines can provide information to, and receive information from, other hardware engines. Accordingly, the described hardware engines may be regarded as being communicatively coupled. Where multiple hardware engines exist contemporaneously, communications may be achieved through signal transmission (e.g., over appropriate circuits and buses) between or among two or more of the hardware engines. In embodiments in which multiple hardware engines are configured or instantiated at different times, communications between such hardware engines may be achieved, for example, through the storage and retrieval of information in memory structures to which the multiple hardware engines have access. For example, one hardware engine may perform an operation and store the output of that operation in a memory device to which it is communicatively coupled. A further hardware engine may then, at a later time, access the memory device to retrieve and process the stored output. Hardware engines may also initiate communications with input or output devices, and can operate on a resource (e.g., a collection of information).

[0100] The various operations of example methods described herein may be performed, at least partially, by one or more processors that are temporarily configured (e.g., by software) or permanently configured to perform the relevant operations. Whether temporarily or permanently configured, such processors may constitute processor-implemented engines that operate to perform one or more operations or functions described herein. As used herein, “processor-implemented engine” refers to a hardware engine implemented using one or more processors.

[0101] Similarly, the methods described herein may be at least partially processor-implemented, with a particular processor or processors being an example of hardware. For example, at least some of the operations of a method may be performed by one or more processors or processor-implemented engines. Moreover, the one or more processors may also operate to support performance of the relevant operations in a “cloud computing” environment or as a “software as a service” (SaaS). For example, at least some of the operations may be performed by a group of computers (as examples of machines including processors), with these operations being accessible via a network (e.g., the Internet) and via one or more appropriate interfaces (e.g., an Application Program Interface (API)).

[0102] The performance of certain of the operations may be distributed among the processors, not only residing within a single machine, but deployed across a number of machines. In some example embodiments, the processors or processor-implemented engines may be located in a single geographic location (e.g., within a home environment, an office environment, or a server farm). In other example embodiments, the processors or processor-implemented engines may be distributed across a number of geographic locations.

### Language

[0103] Throughout this specification, plural instances may implement components, operations, or structures described as a single instance. Although individual operations of one or more methods are illustrated and described as separate operations, one or more of the individual operations may be performed concurrently, and nothing requires that the operations be performed in the order illustrated. Structures and functionality presented as separate components in example configurations may be implemented as a combined structure or component. Similarly, structures and functionality presented as a single component may be implemented as separate components. These and other variations, modifications, additions, and improvements fall within the scope of the subject matter herein.

[0104] Although an overview of the subject matter has been described with reference to specific example embodiments, various modifications and changes may be made to these embodiments without departing from the broader scope of embodiments of the present disclosure. Such embodiments of the subject matter may be referred to herein, individually or collectively, by the term “invention” merely for convenience and without intending to voluntarily limit the scope of this application to any single disclosure or concept if more than one is, in fact, disclosed.

[0105] The embodiments illustrated herein are described in sufficient detail to enable those skilled in the art to practice the teachings disclosed. Other embodiments may be used and derived therefrom, such that structural and logical substitutions and changes may be made without departing from the scope of this disclosure. The Detailed Description, therefore, is not to be taken in a limiting sense, and the scope of various embodiments is defined only by the appended claims, along with the full range of equivalents to which such claims are entitled.

[0106] It will be appreciated that an “engine,” “system,” “data store,” and/or “database” may comprise software, hardware, firmware, and/or circuitry. In one example, one or more software programs comprising instructions capable of being executable by a processor may perform one or more of the functions of the engines, data stores, databases, or systems described herein. In another example, circuitry may perform the same or similar functions. Alternative embodiments may comprise more, less, or functionally equivalent engines, systems, data stores, or databases, and still be within the scope of present embodiments. For example, the functionality of the various systems, engines, data stores, and/or databases may be combined or divided differently.

[0107] “Open source” software is defined herein to be source code that allows distribution as source code as well as compiled form, with a well-publicized and indexed means of obtaining the source, optionally with a license that allows modifications and derived works.

[0108] The data stores described herein may be any suitable structure (e.g., an active database, a relational database, a self-referential database, a table, a matrix, an array, a flat file, a documented-oriented storage system, a non-relational No-SQL system, and the like), and may be cloud-based or otherwise.

### EXAMPLES

### Example 1. Identification of New Antimicrobial α-Core Helices

[0109] This example describes an experiment in which a consensus sequence formula was developed and used to search for new α-helical antimicrobial peptides (AHAPs) having microbiocidal activities.

[0110] Among the most potent natural antibiotics known to date include α-helical host defense peptides. These peptides effect a first line of defense against invading pathogens and have been isolated from species ranging from microbes to man. While many prior investigations have analyzed individual and class-specific properties through which these peptides convey function, machine-learning strategies to define unifying principles and underlying structure activity relationships (SARs) have been limited. In this example, a systematic formula encompassing features of idealized amphipathic and/or antimicrobial helices that span up to 18 positions of canonical right-handed α-helices was designed. The formula was then applied to search known protein databases seeking known as well as unforeseen proteins or peptides fulfilling its structural signature. Results demonstrate that nearly all families of known antimicrobial α-helical peptides align with this formula. Interestingly, logical search algorithms using this formula discovered many previously uncharacterized sequences predicted to have direct antimicrobial activity. Laboratory studies affirmed the veracity of predictions and established validity of the α-core formula and search strategy. As a result, new protein and peptide families and specific sequences are identified as having potent and direct microbicidal efficacy that heretofore had not been ascribed.

### Methods and Materials

### Identification of the α-Core Formula

[0111] To identify a consensus formula that was representative of nearly all classes of AHAPs, multiple sequence alignments with prototypical α-helical peptides using CLUSTAL W (www.ebi.ac.uk/Tools/msa/clustalw2/) were carried out. Alignments were then manually adjusted at certain positions using MEGA 6. Through iterative refinements of this process, an 18 residue generalized amphipathic formula emerged with sequence degeneracies at each position that was representative of nearly all classes of AHAPs. This formula can initiate at any of the positions that make up a standardized 18 residue α-helical wheel.

### Assignment of Residue Polarity within the α-Core Formula

[0112] Within the formula, individual residues were categorized as either hydrophobic or hydrophilic as per the Wimley-White hydrophobicity scale, a scale that has been empirically derived and includes contributions from the peptide bond. One exception was for alanine (A), which was also included with the hydrophobic residues as per the Eisenberg and Kyte-Doolittle hydrophobicity scales. This assignment was made in-part due to preliminary studies that frequently localized alanine to the hydrophobic facet of many antimicrobial peptides.

### Accuracy of Formula in Retrieving Helical Sequences

[0113] The amphipathic helical consensus formula above was queried against the PDB 3D database (www.wwpdb.org) to assess the fidelity of the formula in identifying helical domains. The first 100 non-redundant retrieved structures were scored for helicity of the target sequence. Proteins were considered to be a positive hit if the target sequence was more than 75% helical.

### Use of α-Core Formula as a Database Query

[0114] The α-core sequence formula was used with the ScanProsite (prosite.expasy.org/scanprosite/) tool to carry out iterative pattern searches of the UniProtKB Swiss-Prot database. While initial searches queried the database with varying lengths of the amphipathic sequence formula, it was ultimately found that a relatively short query sequence of 12 residues was most efficient at retrieving the majority of antimicrobial peptide sequences. Iteration 1 of this query sequence is listed below:

X-[VILMCFWYAG]-[KRHEDNQSTAG]-[KRHEDNQSTAG]-
[VILMCFWYAG]-[VILMCFWYAG]-[KRHEDNQSTAG]-
[KRHEDNQSTAG]-[VILMCFWYAG]-X-[KRHEDNQSTAG]-
[VILMCFWYAG]

[0115] After this optimization process, the sequence formula was used as a query against the UniProtKB Swiss-Prot and TrEMBL databases. The formula was advanced one position at a time through 18 iterations to represent an entire 18-residue helical wheel span. ScanProsite search results were further limited by: 1) protein size (<200 residues); 2) eukaryotic organisms; and 3) localization of the pattern to the C-terminal region using a “X(0,50)>” logical operator.

### Signal Peptide and Biophysical Parameter Determination

[0116] Retrieved datasets were additionally screened for the presence of a signal peptide using SignalP 4.1 (www.cbs.dtu.dk/services/SignalP/). Hydrophobic moment (μH), mean hydrophobicity (H), net charge (Q−K and R (+1); H (+0.5); D and E (−1)) and K and R residue frequency were determined in batch using Python algorithms created for this purpose. PI was determined using the ExPasy Compute PI tool (web.expasy.org/compute_pi/).

### Candidate Peptides and HDPs

[0117] Select candidate microbicidal peptides were commercially synthesized by BioMatik (Biomatik USA, Wilmington, Del.). Lyophilized peptides were reconstituted with ddIH20 and stored in aliquots at −20° C. LL-37 (Peptides International, Louisville, Ky.), a prototypic human AHAP, was used as a comparator in microbicidal assays.

### Assay for Antimicrobial Activity

[0118] Putative antimicrobial peptides were assayed for microbicidal activity using a well-established radial diffusion method modified to pH 5.5 or 7.5. A panel of microorganisms was tested: Gram-positive Staphylococcus aureus (ISP 479C, ISP 479R); Gram-negative Salmonella typhimurium (MS 5996s, MS 14028), Pseudomonas aeruginosa (PA01), Acinetobacter baumanni (19606) and the fungus Candida albicans (36082S, 36082R). Logarithmic phase organisms were inoculated (10⁶ CFU/ml) into buffered agarose, and poured into plates. Peptides (10 μg) were introduced into wells in the seeded matrix, and incubated for 3 h at 37° C. Nutrient overlay medium was applied, and assays incubated at 37° C. or 30° C. for bacteria or fungi, respectively. After 24 h, zones of inhibition were measured. Independent experiments were repeated a minimum of two times.

### Results

### Derivation and Iterative Refinement of the α-Core Sequence Formula

[0119] In initial studies, alignments with prototypic representatives from all of the major classes of AHAPs were carried out to identify conserved sequence elements. This analysis revealed that nearly all of these prototypes could be aligned with a degenerate sequence formula wherein either polar or non-polar residues were assigned to positions along an amphipathic helix. Peptides adhered to this formula ranging from a minimal 11 to maximal 16 residue span corresponding to 3 to 4.5 turns of an α-helix. Based on this analysis, a consensus formula representative of nearly all of the major classes of AHAPs was extracted (FIGS. 1A-B and 2).

[0120] Once this preliminary consensus was defined, it was further refined by testing its efficiency to return α-helical domains when used as a query against the PDB protein structure database. As a baseline, versions of the formula lacking known helix breakers proline and glycine were carried out. Results of these analyses revealed that the efficiency of the formula in retrieving α-helical domains was very high, identifying these motifs (defined as spans that were at least 75% helical) with a frequency of 92-94%.

[0121] As many AHAPs are known to contain proline and glycine residues, subsequent tests to evaluate the impact of these residues on the efficiency of the formula were carried out. When proline was included within the sequence formula, α-helical domains within target sequences were retrieved less than 10% of the time. These findings strongly support the theory that proline, due to its side chain and steric constraints, is inconsistent with stable α-helix formation. Because of this, proline was excluded from the formula.

[0122] In contrast when glycine was allowed within the sequence formula, queries against the structure database revealed two different outcomes depending on whether targets had been determined in aqueous or non-polar environments. For structures determined in aqueous environments, the sequence formula retrieved α-helical domains approximately 74% of the time when a single glycine was present; a value that was reduced to 40% when two or more glycine residues were present. By comparison, when target structures were determined in non-polar environments (high levels of TFE, SDS, or micellar components), the presence of glycine had very little impact on peptide helicity. These studies revealed that the sequence formula retrieved α-helical domains approximately 92% if the time when as many as four glycine residues were present in the target sequence. Because of this, and since glycine is highly represented in AHAPs, this residue was included in the sequence formula. Moreover, a large number of biophysical studies have demonstrated that while many glycine-rich AHAPs are unstructured in aqueous environments, they nearly always adopt an α-helical conformation when interacting with the hydrophobic membrane environments of their microbial targets.

### Alanine/Glycine Both Faces of Helix

[0123] While the assignment of most residues to either the polar or non-polar residue group within the sequence formula was relatively straightforward based on the initial AHAP consensus and known residue-specific hydrophobicity values, the placement of alanine and glycine was less obvious due to their relatively neutral AG values in polar and non-polar environments. Because of this, the requirement for glycine and/or alanine on either the polar or non-polar face of the helix was assessed in an iterative manner via queries against a control dataset comprised of more than 400 AHAP peptides (FIG. 3). Preliminary versions of the formula, lacking alanine and glycine, failed to retrieve significant numbers (>10%) of the control AHAP study set (FIG. 3). The inclusion of alanine on the polar face of the amphipathic helix increased the retrieved fraction of peptides to 26%, and when alanine was added to both the polar and non-polar search terms the retrieved AHAPs increased to 48%. With respect to glycine a similar relationship was found. The addition of glycine to the polar face of the query sequence led to the identification of approximately 81% of the control AHAP dataset, and when glycine was included on both the polar and non-polar facets, the query retrieved close to 99% of the AHAP study set. As a result of this analysis, alanine and glycine were included as components of both the polar and non-polar query search terms.

### α-Core Sequence Formula

[0124] Based on the above considerations, a linear α-core formula spanning all 18 positions of a canonical right-handed alpha helix was created, as shown below. When translated into three dimensions, the formula describes an idealized amphipathic helix, with distinct hydrophobic and hydrophilic facets. Positions in between the polar and nonpolar faces were assigned a value of “X” within the linear formula, leading to a polar angle (θ) maxima of 180° and minima of 140° . Due to the degenerate nature of the formula, each position along the helical span was represented by multiple polar or non-polar residues (below and FIGS. 1A-B and 2).

$${Pos}_{( n 0 \text{-} 17 )} = [ ( sin n δ ) , ( cos n δ ) ]$$

$$δ = 100 for standard α \text{-} {helix \\ [ \begin{matrix}1 \; 2 \; 3 \; 4 \; 5 \; 6 \; 7 \; 8 \; 9 \; 10 \; 11 \; 12 \; 13 \; 14 \; 15 \; 16 \; 17 \; 18 \\ X \text{-} ( P \text{-} H \text{-} H \text{-} P \text{-} P \text{-} H \text{-} H \text{-} P ) \text{-} X \text{-} ( H \text{-} P \text{-} P \text{-} H \text{-} H \text{-} P \text{-} P \text{-} H )\end{matrix} ]}_{n = 0 \text{-} 18}$$

$$P ( polar ) = [ EDKRHQNTSAG ]$$

$$H ( hydrophobic ) = [ VMCILFWYAG ]$$

### Primary Database Searches Using the α-Core Sequence Formula

[0125] Once refined, the α-core sequence formula was used as a query against the SwissProt and TrEMBL protein sequence databases (FIG. 4). As described in Methods, database queries were further limited to sequences that were eukaryotic in origin, less than 200 residues in length and within 50 residues of the C-terminus.

[0126] Returned raw datasets consisted of more than 70,000 sequences, often representing multiple target hits shifted along amphipathic helical spans of a single protein. Each of these returned hits was scored for hydrophobic moment, and sequences with the highest pH were extracted to generate a non-redundant dataset of approximately 13,000 unique sequences for downstream studies. Dataset proteins were also scored for the presence of a signal peptide, and sequences lacking this motif were removed to generate a final dataset of approximately 3,800 sequences.

### Efficiency of the α-Core Sequence Formula

[0127] The results of the above database queries indicated that the amphipathic sequence algorithm was highly robust, retrieving members from nearly all of the known AHAP families (Table 1). Overall, the formula retrieved at least one member of more than 106 different helical peptide families representing approximately 94%, of all known AHAP classifications. Moreover, while the formula describes an idealized amphipathic helical structure, it nonetheless returned 827 individual antimicrobial peptide sequences, representing approximately 88% of all known AHAPs in the SwissProt database.

TABLE 1
α-Helical Peptide Families Retrieved with
Alpha-Core Formula Search

| | Class | Peptide | Organism |
|---|---|---|---|
| 1 | Cnidaria | Clavanins | Sea squirt |
| 2 | | Clavaspirin | Sea squirt |
| 3 | | Halocidin | Sea peach |
| 4 | | Halocyntin | Sea squirt |
| 5 | | Styelins | Sea squirt |
| 6 | Plants | Ginkbilobin | Ginko |
| 7 | | Thionin (helical domain) | Wheat |
| 8 | Arthropods | Amphipathic peptides | Scorpion |
| 9 | | Andropin | Fruit fly |
| 10 | | Anionic Antimicrobial peptide 2 | Moth |
| 11 | | Antifungal Protein MAF-1 | Fly |
| 12 | | Antimicrobial peptides (36.4, 143) | Scorpion |
| 13 | | Antimicrobial peptide ctriporin | Scorpion |
| 14 | | Antimicrobial peptide HsAp1 | Scorpion |
| 15 | | Bactericidin | Moth |
| 16 | | Bombolitin | Bee |
| 17 | | Cecropins | Moth/fly |
| 18 | | Cecropin-D-like peptide | Moth |
| 19 | | Cryptonin | Cicada |
| 20 | | Cytotoxic linear peptide | Scorpion |
| 21 | | Decoralin | Wasp |
| 22 | | Dominulins | Wasp |
| 23 | | Eumenitins | Wasp |
| 24 | | Hadrurin | Scorpion |
| 25 | | Im-1 | Scorpion |
| 26 | | Imcroporin | Scorpion |
| 27 | | Lebocin-like peptide | Moth |
| 28 | | Mastoparans | Wasp |
| 29 | | Mastoparan-like peptides | Wasp |
| 30 | | Melittin | Bee |
| 31 | | Meucin-49 | Scorpion |
| 32 | | Moricins | Moth |
| 33 | | Moricin-like peptide A | Moth |
| 34 | | Mucroporin | Scorpion |
| 35 | | Mucroporin-like peptide | Scorpion |
| 36 | | Non-disulfide-bridged peptides | Scorpion |
| 37 | | Oxyopinin 4a | Spider |
| 38 | | Pandinin | Scorpion |
| 39 | | Parabutoporin | Scorpion |
| 40 | | Peptide BmKb1 | Scorpion |
| 41 | | Peptides Ctry | Scorpion |
| 42 | | Peptides Hp (Non-disulfide bridged) | Scorpion |
| 43 | | Pilosulins | Ant |
| 44 | | Ponericins | Ant |
| 45 | | Ponericin W-like | Scorpion |
| 46 | | Protonectin | Wasp |
| 48 | | Stomoxyn | fly |
| 49 | Fish | Chrysophsin | Sea Bream |
| 50 | | Pleurocidin | Flounder |
| 51 | | Pleurocidin-like peptide | Flounder |
| 52 | | Grammistins | Soapfish |
| 53 | | Pardaxins | Sole |
| 54 | | Piscidin 3 | Striped bass |
| 55 | Amphibians | Ascaphin | Frog |
| 56 | | Aureins | Frog |
| 57 | | Antimicrobial peptide PGQ | Frog |
| 58 | | Antimicrobial peptides | Frog |
| 59 | | Brevinins | Frog |
| 60 | | Bombesin | Toad |
| 61 | | Bombinins | Toad |
| 62 | | Bombinin-like peptides | Toad |
| 63 | | Caeridin | Frog |
| 64 | | Caerins | Frog |
| 65 | | Citropins | Frog |
| 66 | | Cyanophlyctin | Frog |
| 67 | | Dahleins | Frog |
| 68 | | Dermadistinctins | Frog |
| 69 | | Dermaseptins | Frog |
| 70 | | Dermaseptin-like peptides | Frog |
| 71 | | Dermatoxin | Frog |
| 72 | | Distinctin-like peptide | Frog |
| 73 | | Esculentins | Frog |
| 74 | | Fallaxidins | Frog |
| 75 | | Frenatins | Frog |
| 76 | | Gaegurin | Frog |
| 77 | | Grahamins | Frog |
| 78 | | Guentherin | Frog |
| 79 | | Hylins | Frog |
| 80 | | Maximins | Toad |
| 81 | | Nigrocins | Frog |
| 82 | | Ocellatins | Frog |
| 83 | | Palustrins | Frog |
| 84 | | Phylloseptins | Frog |
| 85 | | Pseudins | Frog |
| 86 | | Prolevitide | Frog |
| 87 | | Ranatuerins | Frog |
| 88 | | Rugosins | Frog |
| 89 | | Syphaxin | Frog |
| 90 | | Temporins | Frog |
| 91 | | Xenopsin | Frog |
| 92 | | Uperins | Frog |
| 93 | Reptiles | CRAMPs | Snake |
| 94 | Birds | Cathelicidins | Chicken |
| 95 | Mammals | Cathelicidins | Mammals |
| 96 | | Cathelicidin related peptide SC5 | Sheep |
| 97 | | CRAMP | Mouse |
| 98 | | CAP-18 | Rabbit |
| 99 | | PMAP-37 | Pig |
| 100 | | Chemokines (helical domain) | Mammals |
| 101 | | CXCL | |
| 102 | | CCL | |
| 103 | | XCL | |
| 104 | | Granulysin | Human |
| 105 | | Dermcidin | Human |
| 106 | | NK-lysin | Horse |

[0128] Beyond retrieving a high proportion of known AHAPs, when limited to sequences with a PI of 8.5 or greater, the formula was also relatively specific in returning these sequences. Searches were carried out in several stages of either 0-50, or 51-200 residues, depending on whether a signal peptide test was applied. For the 0-50 residue set, approximately 71% of the retrieved sequences were known AHAPs; whereas, for the 51-200 residue set, approximately 27% of the identified sequences were α-helical antimicrobial proteins. Given that there are approximately 940 (see methods) named AHAPs in the 553,000 sequence SwissProt database (version 12-1-16), this represents and in-silico enrichment of approximately 130-fold.

[0129] With respect to other proteins retrieved by the sequence formula, the second most highly represented group were a variety of toxin peptides making up approximately 17% of the dataset. Beyond this, other protein families that were abundant in the retrieved dataset included: apovitellins, leptins, vasoactive intestinal proteins and uncharacterized proteins.

### Residue Frequency

[0130] Given that the α-core sequence formula returns aligned datasets, it was possible to score identified AHAP helices for the abundance of various residues at each position along an 18 residue amphipathic span. Moreover, given that the α-core formula identifies amphipathic patterns that are likely to form helices, it was also possible to make assumptions about the localization of specific resides to either the polar or non-polar facet of these structures. Due to the significant evolutionary distance between invertebrate and lower and higher vertebrate classes of AHAPs, the dataset was divided into three groups representing arthropod, amphibian and mammalian sequences (FIG. 5).

[0131] The analysis of residue frequency revealed a number of findings regarding the composition and hydrophilic and hydrophobic distribution of residues within returned AHAP helices. One finding of note was that glycine was highly represented in AHAPs of lower organisms, comprising approximately 30-35% of all residues in target amphipathic spans in arthropods and amphibians. While glycine was still abundant in mammals, it occurred less frequently representing about 15% of residues in the returned sequences.

[0132] It was also of interest to find that alanine, while abundant in amphipathic spans of arthropods and amphibians, was much less common in the identified sequences of mammals. Moreover, while alanine was found more frequently on the hydrophobic face of the peptide, it was also found with some frequency 10-30% on the polar face of peptides from arthropods and amphibians.

[0133] With respect to charged residues, it is of interest that lysine was the most abundant polar residue in non-mammalian species (30%) and was strongly preferred over arginine at an approximately 12:1 ratio. By contrast, in mammals this preference was markedly reduced, with this ratio decreasing to a 3:1 abundance of lysine to arginine. It is also of note to find negatively charged aspartic and glutamic acid residues within the returned sequences at a low frequency of approximately 5% in all species groups.

### Biophysical Signatures

[0134] Beyond measuring the frequency of specific residues within returned AHAP helices, sequences were also scored for a number of biophysical parameters including: net charge (Q), isoelectric point (PI), hydrophobic moment (μH), hydrophobicity (H), and lysine to arginine (K/K+R) ratio.

[0135] In this analysis it was found that the average net charge for the AHAP subset of study helices (n=803) was +2.0. If only cationic sequences (Q≥0.5; n=707) were considered this value rises to +2.7. By comparison the mean net charge for study toxin helices (n=717) was +1.3, and +0.6 for other study helices. With respect to hydrophobic moment, AHAP helices had an average μH of 0.52 while toxins had an average pH 0.42 and other peptides 0.39. While some reports suggest that mean hydrophobicity may be greater for toxins than for AHAPs, in this study values for hydrophobicity in the retrieved helices were similar, with an average H of 0.42 for AHAPs, and 0.34 for toxins as compared with other peptides (0.39).

### Negative Gaussian Curvature

[0136] Retrieved sequences were also scored for their ratio of lysine to arginine (N_{K}/N_{K}+N_{R}) residues. Prior studies have demonstrated that the relative abundance of these residues can significantly impact the propensity of a given peptide to induce negative Gaussian curvature (NGC) in membranes, a phenomenon that is associated with pore formation and membrane permeabilization. Prior studies have demonstrated that the residue lysine is favored over arginine in AHAPs, a substitution that necessitates an increased level of peptide hydrophobicity to efficiently induce NGC. In the present example, retrieved AHAP helices largely adhered to this rule, demonstrating a modest positive association between N_{K}/N_{K}+N_{R} ratio and peptide hydrophobicity (FIG. 6). By comparison, amphipathic helices from toxins did not comply with this observation, where a negative relationship between N_{K}/N_{K}+N_{R} ratio and peptide hydrophobicity was found.

### Application of the α-Core Sequence Formula to Retrieve Previously Uncharacterized Antimicrobial Sequences

[0137] In addition to the known classes of antimicrobial proteins, the α-core formula also retrieved many uncharacterized proteins, or proteins with an alternate primary function. Based on the efficiency with which the formula retrieved antimicrobial peptides, it was of interest to determine whether some of these additional sequences might represent: 1) as yet uncharacterized antimicrobial proteins; or 2) proteins with an assigned function that also have an as yet unidentified antimicrobial function or antimicrobial domain within a larger protein.

[0138] To identify putative microbicidal sequences, study set peptides were scored for the biophysical parameters described above (μH, Q, H, K/K+R, PI) and analyzed to determine which factors and/or relationships were most efficient at separating known AHAPs from non-microbicidal sequences. Results from these analyses, demonstrated that mean amphipathicity (μH) and either net charge (Q) (FIG. 7) or PI were the most efficient means of discriminating bona-fide AHAPs from other sequences.

[0139] Based on the above analyses, dataset proteins were scored for either cationicity or PI and hydrophobic moment (Q*μH) or (PI*μH) and sequences of interest were prioritized. While this analysis retrieved many peptides of interest, several families of biological significance were consistently found amongst the top scoring sequences. These included members of the γ-chain-dependent interleukin family along with many interferon sequences. Moreover, a number of consistently high scoring peptides were also derived from the globally-impactful plant pathogen Phytophthora parasitica.

[0140] Given the above considerations, ten lead candidates representing these families were synthesized so that their antimicrobial properties could be determined (Table 2). As shown in Table 2, they included:

[0141] Interleukins

[0142] IL-5—Meleagris gallopavo (common turkey)

[0143] IL-7—human

[0144] IL-13—human

[0145] IL-21—human

[0146] Interferons

[0147] IFN-γ—Myotis davidii (vesper bat)

[0148] IFN-γ—human

[0149] Phytophthora parasitica Uncharacterized Sequences

[0150] Pp-1—P. parasitica

[0151] Pp-2—P. parasitica

[0152] Pp-3—P. parasitica

[0153] Pp-4—P. parasitica

[0154] Two additional candidates were identified when the localization of the pattern relative to the C-terminal region was relaxed. These two candidates, along with two respective longer versions are listed in Table 3. Additional listings of identified peptides are provided in Table 4, and SEQ ID NO:518-6029 (localization required) and SEQ ID NO:6030-6860 (localization requirement relaxed).

TABLE 2
Study set peptides

| | | | | | | | SEQ |
|---|---|---|---|---|---|---|---|
| Short | | | | | | | ID |
| Name | Peptide | Accession | Species | Sequence | Charge | μH | NO: |
| tIL-5 | IL-5 | G1N9U6 | Meleagris | KRFIEKLRTF LRKLSRGAK | +7 | 0.68 | 1 |
| | | | gallopavo | | | | |
| hIL7 | IL-7 | P13232 | Homo sapiens | LCFLKRLLQE IKTCWNKILM | +3.5 | 0.47 | 2 |
| | | | | GTKEH | | | |
| hIL-13 | IL-13 | P35225 | Homo sapiens | EVAQFVKDLL LHLKKLFREG | +2.5 | 0.39 | 3 |
| | | | | RFN | | | |
| hIL-21 | IL-21 | Q9HBE4 | Homo sapiens | KEFLERFKSL LQKMIHQHLS | +2.5 | 0.32 | 4 |
| | | | | SRTHGSEDS | | | |
| bIFN-γ | IFN-g | L5LME8 | Myotis | KAISELYNVI TELSKSNSKM | +8 | 0.40 | 5 |
| | | | davidii | RKRRQNLFRG WKASK | | | |
| hIFN-γ | IFN-g | P01579 | Homo sapiens | AIHELIQVMA ELSPAAKTGK | +6 | 0.23 | 6 |
| | | | | RKRSQMLFRG RRASQ | | | |
| Pp-1 | | W2QY53 | Phytophthora | TQAWTNFKKW FKKWFKKTFS | +6 | 0.59 | 7 |
| | | | parasitica | | | | |
| Pp-2 | | W2N8A5 | Phytophthora | LFQKIKRWWK RIFEHEASRS | +7.5 | 0.47 | 8 |
| | | | parasitica | ARRLRAV | | | |
| Pp-3 | | W2HTE6 | Phytophthora | KEVIKKFTKA MEKMKKNGRA | +6 | 0.54 | 9 |
| | | | parasitica | | | | |
| Pp-4 | | A0A080YYV3 | Phytophthora | LWQRFLRWWN RLFHVSSNRL | +6.5 | 0.42 | 10 |
| | | | parasitica | LREGGKK | | | |

TABLE 3
Additional peptides identified with relaxed
localization requirement

| | | | | | | | SEQ |
|---|---|---|---|---|---|---|---|
| | Acces- | | | | | | ID |
| Peptide | sion | Species | Sequence | Length | Charge | μH | NO |
| Dynorphin | P01213 | Homo | YGGFLRRIRP KLKWDNQ | 17 | +4 | 0.32 | 11 |
| A (short) | | sapiens | | | | | |
| Dynorphin | P01213 | Homo | YGGFLRRIRP KLKWDNQKRY | 32 | +9 | 0.16 | 13 |
| (long) | | sapiens | GGFLRRQFKV VT | | | | |
| Oncostatin | P13725 | Homo | KEFLERFKSL LQKMIHQHLS | 29 | +2.5 | 0.32 | 12 |
| M (short) | | sapiens | SRTHGSEDS | | | | |
| Oncostatin | P13725 | Homo | RFLHGYHRFM HSVGRVFSKW | 60 | +19.5 | 0.32 | 14 |
| M (long) | | sapiens | GESPNRSRRH SPHQALRKGV | | | | |
| | | | RRTRPSRKGK RLMTRGQLPR | | | | |

TABLE 4
Priority alpha core peptide sequences

| | | | | | | | SEQ |
|---|---|---|---|---|---|---|---|
| Acces- | | | | | | | ID |
| sion # | Name | Comp Form Match | HM | Q | HM*Q | PI | NO: |
| W7G0H8 | Uncharacterized protein | RIKKFLKRCCKKIK | 0.82 | 8 | 6.52 | 6.17 | 19 |
| W4IIC4 | Uncharacterized protein | RIKKFLKRCCKKIK | 0.82 | 8 | 6.52 | 6.03 | 20 |
| A0A024W805 | Uncharacterized protein | RIKKFLKRCCKKIK | 0.82 | 8 | 6.52 | 6.03 | 21 |
| U3KN10 | Uncharacterized protein | FLKKLLQKIKTCWNKILR | 0.75 | 6 | 4.51 | 8.7 | 22 |
| | | GIKE | | | | | |
| A0A016VH75 | Uncharacterized protein | KRVKRFCKKACRKASQ | 0.56 | 8 | 4.47 | 9.2 | 23 |
| A0A016VGG2 | Uncharacterized protein | KRVKRFCKKACRKASQ | 0.56 | 8 | 4.47 | 9.2 | 24 |
| G1N9U6 | Uncharacterized protein | KNVKRFIEKLRTFLRKLS | 0.72 | 6 | 4.34 | 9.44 | 25 |
| Q8SUJ0 | Uncharacterized protein | LVRKIIKYCRKL | 0.86 | 5 | 4.28 | 5.53 | 26 |
| M1JIG5 | Uncharacterized protein | LVRKIIKYCRKL | 0.86 | 5 | 4.28 | 5.53 | 27 |
| T1HZ04 | Uncharacterized protein | FRRLCRNIKEVIKK | 0.85 | 5 | 4.25 | 6.15 | 28 |
| A0A080YVY9 | Uncharacterized protein | TQAWTNFKKWFKKWFKK | 0.69 | 6 | 4.13 | 9.23 | 29 |
| W2QY53 | Uncharacterized protein | TQAWTNFKKWFKKWFKK | 0.69 | 6 | 4.13 | 9.23 | 30 |
| W2W791 | Uncharacterized protein | TQAWTNFKKWFKKWFKK | 0.69 | 6 | 4.13 | 9.23 | 31 |
| W2G110 | Uncharacterized protein | TQAWTNFKKWFKKWFKK | 0.69 | 6 | 4.13 | 9.23 | 32 |
| E0AD11 | Interleukin-5 | VKKFIEKLRTFIRKL | 0.82 | 5 | 4.08 | 9.06 | 33 |
| Q5W4T8 | Interleukin-5 | VKKFIEKLRTFIRKL | 0.82 | 5 | 4.08 | 8.88 | 34 |
| F1P2P6 | Uncharacterized protein | VKKFIEKLRTFIRKL | 0.82 | 5 | 4.08 | 8.88 | 35 |
| A0A093FG05 | Interleukin-21 (Fragment) | KEFLKSFAKLIRKVIR | 0.80 | 5 | 4.02 | 9.54 | 36 |
| A0A094LKV9 | Interleukin-21 (Fragment) | KEFLKSFAKLIKKVIR | 0.80 | 5 | 4.01 | 9.57 | 37 |
| A0A091RQW4 | Interleukin-21 (Fragment) | KEFLKSFAKLIKKVIR | 0.80 | 5 | 4.01 | 9.49 | 38 |
| A0A091U0R6 | Interleukin-21 (Fragment) | KEFLKSFAKLIKKVIR | 0.80 | 5 | 4.01 | 9.44 | 39 |
| A0A091WDE2 | Interleukin-21 (Fragment) | KEFLKSFAKLIKKVIR | 0.80 | 5 | 4.01 | 9.37 | 40 |
| A0A091Q048 | Interleukin-21 (Fragment) | KEFLKSLAKLIKKVIR | 0.80 | 5 | 3.99 | 9.61 | 41 |
| Q32620 | Uncharacterized 3.3 kDa protein | FFKWISKFIRRLSKCG | 0.79 | 5 | 3.95 | 10.74 | 42 |
| | in psbT-psbN intergenic region | | | | | | |
| | (ORF27) | | | | | | |
| H2WTG9 | Uncharacterized protein | ANKANRMMRKIMRKL | 0.66 | 6 | 3.94 | 4.9 | 43 |
| F6W4B4 | Uncharacterized protein (Fragment) | WYQLIRTFGNLIHQKYRKL | 0.59 | 6.5 | 3.86 | 9.3 | 44 |
| | | LEAYRKLR | | | | | |
| P56478 | Interleukin-7 (IL-7) | FLKRLLREIKTCWNKILKG | 0.77 | 5 | 3.83 | 8.91 | 45 |
| Q544C8 | Interleukin 7 (Interleukin 7, | FLKRLLREIKTCWNKILKG | 0.77 | 5 | 3.83 | 8.73 | 46 |
| | isoform CRA_b) | | | | | | |
| P10168 | Interleukin-7 (IL-7) | FLKRLLREIKTCWNKILKG | 0.77 | 5 | 3.83 | 8.73 | 47 |
| A0A078IDV8 | BnaC03g69180D protein | IIKVITRALRGARRLLKY | 0.64 | 6 | 3.81 | 10.16 | 48 |
| G7MZL5 | Interleukin-7 (Fragment) | FLKRLLQKIKTCWNKIL | 0.76 | 5 | 3.79 | 9.21 | 49 |
| G7PC28 | Interleukin-7 (Fragment) | FLKRLLQKIKTCWNKIL | 0.76 | 5 | 3.79 | 9.07 | 50 |
| Q95J83 | Interleukin 7 | FLKRLLQKIKTCWNKIL | 0.76 | 5 | 3.79 | 9 | 51 |
| Q8HZN1 | Interleukin-7 | FLKRLLQKIKTCWNKIL | 0.76 | 5 | 3.79 | 9 | 52 |
| B6E124 | Interleukin-7 | FLKRLLQKIKTCWNKIL | 0.76 | 5 | 3.79 | 8.99 | 53 |
| A0A096N2Z5 | Uncharacterized protein | FLKRLLQKIKTCWNKIL | 0.76 | 5 | 3.79 | 9 | 54 |
| F7G6P7 | Uncharacterized protein (Fragment) | FLKRLLQKIKTCWNKIL | 0.76 | 5 | 3.79 | 8.81 | 55 |
| F7G6Q1 | Uncharacterized protein (Fragment) | FLKRLLQKIKTCWNKIL | 0.76 | 5 | 3.79 | 8.71 | 56 |
| D0NCA0 | Putative uncharacterized protein | NGLFQKIKRWWKRIFDR | 0.75 | 5 | 3.73 | 10.62 | 57 |
| A0A093GP59 | Interferon alpha-2 (Fragment) | RRCLQLAHKVIRKL | 0.67 | 5.5 | 3.69 | 9.81 | 58 |
| H0Z3Q1 | Uncharacterized protein | FIKKLMTFIRKVLKT | 0.74 | 5 | 3.68 | 9.41 | 59 |
| L7NUA5 | Interleukin-7 variant 2 | FVKRLLDEIKTCWNKILR | 0.70 | 5 | 3.51 | 9.56 | 60 |
| | | GAKK | | | | | |
| L7NU76 | Interleukin-7 variant 5 | FVKRLLDEIKTCWNKILR | 0.70 | 5 | 3.51 | 9.48 | 61 |
| | | GAKK | | | | | |
| L7NU80 | Interleukin-7 variant 1 | FVKRLLDEIKTCWNKILR | 0.70 | 5 | 3.51 | 9.33 | 62 |
| | | GAKK | | | | | |
| L7NUC8 | Interleukin-7 variant 4 | FVKRLLDEIKTCWNKILR | 0.70 | 5 | 3.51 | 9.24 | 63 |
| | | GAKK | | | | | |
| L7NU82 | Interleukin-7 variant 3 | FVKRLLDEIKTCWNKILR | 0.70 | 5 | 3.51 | 9 | 64 |
| | | GAKK | | | | | |
| L7NU81 | Interleukin-7 variant 6 | FVKRLLDEIKTCWNKILR | 0.70 | 5 | 3.51 | 8.85 | 65 |
| | | GAKK | | | | | |
| H0VFS1 | Uncharacterized protein (Fragment) | FLKTLLQKIKTCWNKILRG | 0.68 | 5 | 3.40 | 9.27 | 66 |
| P48816 | Lysozyme (EC 3.2.1.17) (1,4- | ITKAAKCAKKIYKR | 0.56 | 6 | 3.37 | 9.06 | 67 |
| | beta-N-acetylmuramidase) | | | | | | |
| W2I7H3 | Uncharacterized protein | TQAWTNFKKWFKNWFKK | 0.67 | 5 | 3.36 | 8.34 | 68 |
| W2JZX5 | Uncharacterized protein | KEVIKKFTKAMEKMKK | 0.67 | 5 | 3.35 | 10.12 | 69 |
| W2VUY9 | Uncharacterized protein | KEVIKKFTKAMEKMKK | 0.67 | 5 | 3.35 | 10.12 | 70 |
| W2HTE6 | Uncharacterized protein | KEVIKKFTKAMEKMKK | 0.67 | 5 | 3.35 | 10.12 | 71 |
| A0A080Z0D6 | Uncharacterized protein | KEVIKKFTKAMEKMKK | 0.67 | 5 | 3.35 | 10.12 | 72 |
| W2FPC4 | Uncharacterized protein | KEVIKKFTKAMEKMKK | 0.67 | 5 | 3.35 | 9.91 | 73 |
| W2Y3P7 | Uncharacterized protein | KEVIKKFTKAMEKMKK | 0.67 | 5 | 3.35 | 9.91 | 74 |
| W2QT56 | Uncharacterized protein | KEVIKKFTKAMEKMKK | 0.67 | 5 | 3.35 | 9.91 | 75 |
| W2N8A5 | Uncharacterized protein | NGLFQKIKRWWKRIFEH | 0.74 | 4.5 | 3.34 | 10.43 | 76 |
| W2RAE5 | Uncharacterized protein | NGLFQKIKRWWKRIFEH | 0.74 | 4.5 | 3.34 | 10.43 | 77 |
| W2WX61 | Uncharacterized protein | NGLFQKIKRWWKRIFEH | 0.74 | 4.5 | 3.34 | 10.43 | 78 |
| A0A081A496 | Uncharacterized protein | NGLFQKIKRWWKRIFEH | 0.74 | 4.5 | 3.34 | 10.31 | 79 |
| W2Z9T6 | Uncharacterized protein | NGLFQKIKRWWKRIFEH | 0.74 | 4.5 | 3.34 | 10.31 | 80 |
| P50718 | Lysozyme (EC 3.2.1.17) | ITKASKCAKKIYKR | 0.55 | 6 | 3.33 | 9.15 | 81 |
| | (1,4-beta-N-acetylmuramidase) | | | | | | |
| T0L7V9 | Uncharacterized protein | LWDKFQKFLKKVIRI | 0.82 | 4 | 3.30 | 6.88 | 82 |
| A0A072TQ32 | Transmembrane protein, putative | CNHMPNLLTRCLQRLKRLK | 0.60 | 5.5 | 3.28 | 10.05 | 83 |
| G7KJJ5 | Nodule Cysteine-Rich (NCR) | HSFYKCIDNLCKRFRR | 0.73 | 4.5 | 3.28 | 8.83 | 84 |
| | secreted peptide | | | | | | |
| A0A091WML3 | Interferon alpha-2 (Fragment) | MRRCLQLIDKVIRKL | 0.81 | 4 | 3.26 | 9.78 | 85 |
| A0A091K0Z9 | Interferon alpha-2 (Fragment) | MRRCLQLIDKVIRKL | 0.81 | 4 | 3.26 | 9.78 | 86 |
| A0A091JCY0 | Interferon epsilon (Fragment) | MRRCLQLIDKVIRKL | 0.81 | 4 | 3.26 | 9.76 | 87 |
| A0A091KMX5 | Interferon alpha-2 (Fragment) | MRRCLQLIDKVIRKL | 0.81 | 4 | 3.26 | 9.72 | 88 |
| A0A093RGB3 | Interferon alpha-2 (Fragment) | MRRCLQLIDKVIRKL | 0.81 | 4 | 3.26 | 9.63 | 89 |
| A0A091SY09 | Interferon alpha-2 (Fragment) | MRRCLQLIDKVIRKL | 0.81 | 4 | 3.26 | 9.62 | 90 |
| A0A094KQN9 | Interferon alpha-2 (Fragment) | MRRCLQLIDKVIRKL | 0.81 | 4 | 3.26 | 9.62 | 91 |
| A0A093L2W4 | Interferon alpha-2 (Fragment) | MRRCLQLIDKVIRKL | 0.81 | 4 | 3.26 | 9.6 | 92 |
| A0A093FC11 | Interferon alpha-2 (Fragment) | MRRCLQLIDKVIRKL | 0.81 | 4 | 3.26 | 9.55 | 93 |
| A0A087QSI7 | Interferon alpha-2 (Fragment) | MRRCLQLIDKVIRKL | 0.81 | 4 | 3.26 | 9.46 | 94 |
| A0A087VKA8 | Interferon omega-1 (Fragment) | MRRCLQFIDKVIRKL | 0.81 | 4 | 3.26 | 9.57 | 95 |
| A0A091QVA3 | Interferon omega-1 (Fragment) | MRKCLQLIDKVIRKL | 0.81 | 4 | 3.26 | 9.65 | 96 |
| A0A091GAP8 | Interferon alpha-2 (Fragment) | MRRCLQLIEKVIRKL | 0.81 | 4 | 3.25 | 9.87 | 97 |
| A0A091L4R0 | Interleukin-21 (Fragment) | KEFLKSFEKLIKKVIR | 0.81 | 4 | 3.23 | 9.32 | 98 |
| A0A059BP64 | Uncharacterized protein | NLCKRACRTCCTHCRRVP | 0.59 | 5.5 | 3.22 | 8.61 | 99 |
| A0A091VJQ6 | Interferon alpha-2 (Fragment) | RRCLQLIDKVIRKL | 0.80 | 4 | 3.19 | 9.7 | 100 |
| A5JYR0 | Protein C06C3.10 | YARRFSTLFRHLIKMI | 0.71 | 4.5 | 3.18 | 11.56 | 101 |
| A0A091JU23 | Interleukin-21 (Fragment) | REFLKSFAKLIKKVI | 0.79 | 4 | 3.16 | 9.41 | 102 |
| A0A093IE23 | Interferon alpha-2 (Fragment) | MRRCLQLIDKVMRKL | 0.79 | 4 | 3.16 | 9.65 | 103 |
| A0A091P9G9 | Interferon alpha-2 (Fragment) | MRRCLQLIDKVVRKL | 0.79 | 4 | 3.16 | 9.76 | 104 |
| A0A091U5M0 | Interferon alpha-2 (Fragment) | MRRCLQLIDKAIRKI | 0.79 | 4 | 3.14 | 9.65 | 105 |
| A0A093BUH7 | Interferon epsilon (Fragment) | MRRCLQLIDKAIRKL | 0.78 | 4 | 3.11 | 9.33 | 106 |
| A0A094KTL8 | Interferon alpha-2 (Fragment) | MRRCLQLIDKAIKKL | 0.78 | 4 | 3.11 | 9.55 | 107 |
| A0A091SBM1 | Interferon beta (Fragment) | MRRCLQLVDKVIRKL | 0.78 | 4 | 3.11 | 9.61 | 108 |
| A0A093HSG6 | Interferon alpha-2 (Fragment) | MRRCLQFVDKVIKRL | 0.78 | 4 | 3.10 | 9.49 | 109 |
| A0A091HDU2 | Interferon alpha-2 (Fragment) | MRKCLQLVDKVIRKL | 0.78 | 4 | 3.10 | 9.72 | 110 |
| G1PT51 | Uncharacterized protein | VKKAVKYLRTIMKS | 0.62 | 5 | 3.10 | 9.96 | 111 |
| A0A091UC07 | Interleukin-21 (Fragment) | KEFLKSFAKLIKQVIR | 0.78 | 4 | 3.10 | 9.61 | 112 |
| A0A094K224 | Interleukin-21 (Fragment) | KEFLKSFAKLIKQVIR | 0.78 | 4 | 3.10 | 9.54 | 113 |
| A0A093IDB2 | Interleukin-21 (Fragment) | KEFLKSFAKLIKQVIR | 0.78 | 4 | 3.10 | 9.52 | 114 |
| A0A091VRY9 | Interleukin-21 (Fragment) | KEFLKSFAKLIKQVIR | 0.78 | 4 | 3.10 | 9.46 | 115 |
| O95399 | Urotensin-2 (Urotensin II) | LSHLLARIWKPYKK | 0.68 | 4.5 | 3.05 | 4.37 | 116 |
| | (U-II) (UII) | | | | | | |
| M7W4U4 | Lecithin:cholesterol acyltrans- | LSIFAKCFHDLIKKFKKLG | 0.68 | 4.5 | 3.04 | 4.45 | 117 |
| | ferasefamily protein (Fragment) | | | | | | |
| A0A091M384 | Interferon omega-1 (Fragment) | MRRCLQLIDKVARKL | 0.75 | 4 | 3.01 | 9.62 | 118 |
| Q8HYR8 | IL-7 | LLQKIKTCWNKILRGIKE | 0.75 | 4 | 3.01 | 9.04 | 119 |
| L8IFQ4 | Interleukin-7 (Fragment) | LLQKIKTCWNKILRGIKE | 0.75 | 4 | 3.01 | 9.02 | 120 |
| P26895 | Interleukin-7 (IL-7) | LLQKIKTCWNKILRGIKE | 0.75 | 4 | 3.01 | 9.02 | 121 |
| P01588 | Erythropoietin (Epoetin) | FRKLFRVYSNFLRG | 0.75 | 4 | 3.00 | 8.75 | 122 |
| Q91Y32 | Interleukin-7 | FLKRLLREIKTCWNKILNS | 0.74 | 4 | 2.98 | 8.75 | 123 |
| R0LJN1 | Interferon alpha-2 (Fragment) | IRRCLQLIDKAVRKLY | 0.74 | 4 | 2.97 | 9.5 | 124 |
| A0A044QPZ9 | Uncharacterized protein | NFLSLIKKIFSVWKR | 0.74 | 4 | 2.96 | 8.47 | 125 |
| F7BPI0 | Uncharacterized protein | KIMRKIMTNLSRLC | 0.74 | 4 | 2.95 | 10.06 | 126 |
| A0A093EX75 | Interleukin-21 | KEFLKSFAKLIQKVIKS | 0.72 | 4 | 2.90 | 9.28 | 127 |
| A0A091E7E9 | Interleukin-5 (Fragment) | FIKKLMTFIQKVLKN | 0.72 | 4 | 2.88 | 9.13 | 128 |
| P0DKN3 | Turripeptide Lol11.2 (OL67) | RDAGRLLRSLKKLK | 0.57 | 5 | 2.87 | 8.7 | 129 |
| A0A091LVZ3 | Uncharacterized protein | KNATTFIKKLMTFIRKA | 0.57 | 5 | 2.84 | 9.2 | 130 |
| S9YX13 | Olfactory receptor 4A15 | GEMKNAMKKLWTRVRK | 0.57 | 5 | 2.83 | 9.46 | 131 |
| V9DV74 | Uncharacterized protein | TQAWTNFKKWFKKWFKE | 0.69 | 4 | 2.74 | 8.34 | 132 |
| W2KE58 | Uncharacterized protein | TQAWTNFKKWFKKWFKE | 0.69 | 4 | 2.74 | 8.34 | 133 |
| L8YAP6 | Interleukin-13 | EVAQFVKDLLRHLKRLYRH | 0.68 | 4 | 2.73 | 8.97 | 134 |
| Q6UXQ8 | Putative uncharacterized protein | GAGRKVCAKLVKRL | 0.55 | 5 | 2.73 | 11.8 | 135 |
| | UNQ6190/PRO20217 | | | | | | |
| U6CRU1 | Interleukin-7 | LLQKIKTCWNKILRGS | 0.68 | 4 | 2.71 | 9.03 | 136 |
| D2HR10 | Putative uncharacterized protein | LLQKIKTCWNKILRGS | 0.68 | 4 | 2.71 | 9.7 | 137 |
| | (Fragment) | | | | | | |
| M3W2P1 | Uncharacterized protein | LLQKIKTCWNKILRGS | 0.68 | 4 | 2.71 | 9.15 | 138 |
| M4CA57 | Uncharacterized protein | NFIKRINDFLKKAKS | 0.67 | 4 | 2.69 | 9.89 | 139 |
| P13725 | Oncostatin-M (OSM) | RFLHGYHRFMHSVGRVFS | 0.60 | 4.5 | 2.69 | 10.6 | 140 |
| | | KWGES | | | | | |
| U5TZM0 | Interleukin-7 | LLQKIKTCWNKILRGAKEY | 0.67 | 4 | 2.68 | 8.85 | 141 |
| Q9N2G6 | Interleukin-7 (IL-7) | LLQKIKTCWNKILRGAKEY | 0.67 | 4 | 2.68 | 8.7 | 142 |
| K7GL89 | Uncharacterized protein | LLQKIKTCWNKILRGAKEY | 0.67 | 4 | 2.68 | 7.77 | 143 |
| K7GL01 | Uncharacterized protein (Fragment) | LLQKIKTCWNKILRGAKEY | 0.67 | 4 | 2.68 | 7.74 | 144 |
| A0A093PT39 | Interleukin-5 (Fragment) | FINKLMTFIRKALKP | 0.66 | 4 | 2.65 | 9.3 | 145 |
| Q91ZL2 | Interleukin 4 | LKDFLKSLKRIM | 0.88 | 3 | 2.64 | 9.27 | 146 |
| P81278 | Prolactin-releasing peptide | GRGIRPVGRFGRR | 0.53 | 5 | 2.63 | 11.42 | 147 |
| | (PrRP) (Prolactin-releasing | | | | | | |
| | hormone) [Cleaved into: | | | | | | |
| | Prolactin-releasing peptide | | | | | | |
| | PrRP31; | | | | | | |
| | Prolactin-releasing peptide | | | | | | |
| | PrRP20] | | | | | | |
| A0A080YYV3 | Uncharacterized protein | NGLWQRFLRWWNRLFH | 0.75 | 3.5 | 2.62 | 9.86 | 148 |
| W2VQZ9 | Uncharacterized protein | NGLWQRFLRWWNRLFH | 0.75 | 3.5 | 2.62 | 9.86 | 149 |
| W2PXT4 | Uncharacterized protein | NGLWQRFLRWWNRLFH | 0.75 | 3.5 | 2.62 | 9.69 | 150 |
| P86442 | Neuropeptide F (Lom-NPF) (NPF) | SADKFWRRFARR | 0.66 | 4 | 2.62 | 10.84 | 151 |
| | (longNPF) | | | | | | |
| B8BP19 | Putative uncharacterized protein | WSRWWSSCWRLWTRIY | 0.87 | 3 | 2.61 | 4.85 | 152 |
| W2ZYU4 | Uncharacterized protein | YLKEALSRFKSWLKR | 0.65 | 4 | 2.60 | 10.07 | 153 |
| Q9XTN0 | Peptidoglycan recognition protein | SPGRKLYNQIRRWP | 0.65 | 4 | 2.59 | 6.71 | 154 |
| X6P0L4 | Uncharacterized protein | KYGKSCEKAVHDLWHIIKKF | 0.64 | 4 | 2.58 | 8.2 | 155 |
| P24355 | 50S ribosomal protein L36, plastid | KVYSSVRKICKSCG | 0.64 | 4 | 2.57 | 11.06 | 156 |
| W2YJS0 | Uncharacterized protein | TQAWTNFKKWFKKMV | 0.64 | 4 | 2.55 | 5.08 | 157 |
| Q9BBQ2 | 50S ribosomal protein L36, | KIGASVRKICEKCR | 0.64 | 4 | 2.55 | 11.79 | 158 |
| | chloroplastic | | | | | | |
| W2HIB3 | Uncharacterized protein | GGGRDVLTRFKSWFKRVFGK | 0.50 | 5 | 2.52 | 8.39 | 159 |
| P50717 | Lysozyme (EC 3.2.1.17) (1,4-beta-N- | ITKASTCAKKIFKR | 0.50 | 5 | 2.52 | 8.92 | 160 |
| | acetylmuramidase) | | | | | | |
| A0A094LD69 | Uncharacterized protein (Fragment) | FIEKLMTFIRKALKNAR | 0.63 | 4 | 2.51 | 9.3 | 161 |
| Q6UXT8 | Protein FAM150A | AYYKRCARLLTRLA | 0.63 | 4 | 2.51 | 10.39 | 162 |
| Q4RU86 | Protein FAM150-like | AYYKRCARLLTRLA | 0.63 | 4 | 2.51 | 9.98 | 163 |
| I7GA36 | Macaca fascicularis brain cDNA | SQLRNLIRSVRTVMR | 0.62 | 4 | 2.49 | 8.59 | 164 |
| | clone: QtrA-18967, similar to human | | | | | | |
| | HSPC039 protein (HSPC039), | | | | | | |
| | mRNA, RefSeq: NM 016097.2 | | | | | | |
| A0A093IPB5 | Interleukin-5 (Fragment) | KNATKFIEKLMTFIRRA | 0.62 | 4 | 2.48 | 9.2 | 165 |
| P81277 | Prolactin-releasing peptide | YASRGIRPVGRFGRR | 0.49 | 5 | 2.45 | 11.6 | 166 |
| | (PrRP) (Prolactin-releasing hormone) | | | | | | |
| | [Cleaved into: Prolactin-releasing | | | | | | |
| | peptide PrRP31; Prolactin-releasing | | | | | | |
| | peptide PrRP20] | | | | | | |
| P01574 | Interferon beta (IFN-beta) | HLKRYYGRILHYLKA | 0.49 | 5 | 2.45 | 8.9 | 167 |
| | (Fibroblast interferon) | | | | | | |
| Q80UG6 | Protein FAM150B | TIPAYYKRCARLLTRLA | 0.61 | 4 | 2.44 | 9.57 | 168 |
| B2RZ42 | Protein FAM150B | TIPAYYKRCARLLTRLA | 0.61 | 4 | 2.44 | 9.57 | 169 |
| Q6UX46 | Protein FAM150B | TIPAYYKRCARLLTRLA | 0.61 | 4 | 2.44 | 9.37 | 170 |
| P55897 | Histone H2A [Cleaved into: | VGRVHRLLRKGN | 0.54 | 4.5 | 2.43 | 12.41 | 171 |
| | Buforin-1 (Buforin I); | | | | | | |
| | Buforin-2 (Buforin II)] | | | | | | |
| | (Fragment) | | | | | | |
| P07815 | 50S ribosomal protein L36, chloro- | KVAASVRKICEKCR | 0.61 | 4 | 2.42 | 11.64 | 172 |
| | plastic | | | | | | |
| Q95PE0 | Putative uncharacterized protein | IRKIAQLLNKVADAAKKG | 0.60 | 4 | 2.41 | 4.94 | 173 |
| | (Fragment) | | | | | | |
| Q2V364 | Putative defensin-like protein 23 | GGFCKRFAGGAKKCH | 0.54 | 4.5 | 2.41 | 9.14 | 174 |
| Q3E7A6 | Uncharacterized protein YML007C-A, | MRFMRRLVRNLQY | 0.60 | 4 | 2.40 | 12.18 | 175 |
| | mitochondrial | | | | | | |
| P04567 | Mast cell degranulating peptide | LPGFIGKICRKI | 0.80 | 3 | 2.39 | 9.5 | 176 |
| | (MCD peptide)(MCDP) | | | | | | |
| Q3E821 | Uncharacterized protein YBL008W-A | ILANIHKIIKAYQR | 0.68 | 3.5 | 2.38 | 11.19 | 177 |
| K4A4B8 | Uncharacterized protein | IFHGCKKVARVL | 0.68 | 3.5 | 2.37 | 9.19 | 178 |
| P01210 | Proenkephalin-A [Cleaved into: | LAKRYGGFMKRYGGFMKK | 0.58 | 4 | 2.34 | 5.3 | 179 |
| | Synenkephalin; Met-enkephalin | MDELY | | | | | |
| | (Opioid growth factor) (OGF); | | | | | | |
| | PENK(114-133); PENK(143-183); | | | | | | |
| | Met-enkephalin-Arg-Gly-Leu; | | | | | | |
| | Leu-enkephalin; PENK(237-258); | | | | | | |
| | Met-enkephalin-Arg-Phe] | | | | | | |
| A0A085MM52 | Uncharacterized protein | QAIRCMQSLFRTVKR | 0.58 | 4 | 2.33 | 9.45 | 180 |
| Q8N729 | Neuropeptide W (Preproprotein L8) | WRRALRAAAGPLAR | 0.58 | 4 | 2.33 | 11.4 | 181 |
| | (hPPL8) [Cleaved into: Neuropeptide | | | | | | |
| | W-23 (NPW23) (hL8); Neuropeptide | | | | | | |
| | W-30 (NPW30) (hL8C)] | | | | | | |
| R0MAQ4 | NUDIX hydrolase | IKRIIRDVKEIVRA | 0.77 | 3 | 2.32 | 6.92 | 182 |
| A0A093C1K6 | Interleukin-21 (Fragment) | KEFLKSFEKLIQKVIR | 0.77 | 3 | 2.32 | 9.21 | 183 |
| R0M641 | Uncharacterized protein | EKVSNWWKRIWEKIKN | 0.77 | 3 | 2.31 | 5.8 | 184 |
| R0M5R6 | Uncharacterized protein | EKVSNWWKRIWEKIKN | 0.77 | 3 | 2.31 | 5.8 | 185 |
| M4BXP7 | Uncharacterized protein | IPSCVTRALSRAARSIWDA | 0.58 | 4 | 2.31 | 9.89 | 186 |
| | | LKKI | | | | | |
| Q9NRR1 | Cytokine-like protein 1 (Protein C17) | ARKLYTIMNSFCRR | 0.58 | 4 | 2.31 | 8.22 | 187 |
| P81447 | Glycosylation-dependent cell | GKLMELGHKIMKNLENTVKEI | 0.66 | 3.5 | 2.29 | 5.13 | 188 |
| | adhesion molecule 1 (GlyCAM-1) | IKYLKSLF | | | | | |
| | (28 kDa milk glycoprotein PP3) | | | | | | |
| | (Lactophorin) (Proteose-peptone | | | | | | |
| | component 3) (PP3) | | | | | | |
| K7GRI1 | Interleukin | KPIKEFLERLKSLIQKMIHQ | 0.65 | 3.5 | 2.27 | 9.39 | 189 |
| F1RQN2 | Interleukin | KPIKEFLERLKSLIQKMIHQ | 0.65 | 3.5 | 2.27 | 9.39 | 190 |
| Q76LU6 | Interleukin-21 (IL-21) | KPIKEFLERLKSLIQKMIHQ | 0.65 | 3.5 | 2.27 | 9.25 | 191 |
| A0A093G4B0 | Interleukin-21 (Fragment) | KEFLKSFAKLIQKVI | 0.76 | 3 | 2.27 | 9.49 | 192 |
| A0A091LQM6 | Interleukin-21 (Fragment) | KEFLKSFAKLIQKVI | 0.76 | 3 | 2.27 | 9.22 | 193 |
| Q09GK2 | C-type natriuretic peptide (CNP) | RRLKGVAKKGLG | 0.45 | 5 | 2.27 | 8.9 | 194 |
| H2QWB6 | Interleukin 7 (Uncharacterized protein) | FLKRLLQEIKTCWNKIL | 0.75 | 3 | 2.26 | 8.72 | 195 |
| P13232 | Interleukin-7 (IL-7) | FLKRLLQEIKTCWNKIL | 0.75 | 3 | 2.26 | 8.72 | 196 |
| Q5FBX5 | IL7 nirs variant 1 (Interleukin-7) | FLKRLLQEIKTCWNKIL | 0.75 | 3 | 2.26 | 6.14 | 197 |
| A8K673 | cDNA FLJ75417, highly similar to | FLKRLLQEIKTCWNKIL | 0.75 | 3 | 2.26 | 8.72 | 198 |
| | Homo sapiens interleukin 7, mRNA | | | | | | |
| H2PQM2 | Uncharacterized protein | FLKRLLQEIKTCWNKIL | 0.75 | 3 | 2.26 | 8.72 | 199 |
| G1QNL2 | Uncharacterized protein | FLKRLLQEIKTCWNKIL | 0.75 | 3 | 2.26 | 8.72 | 200 |
| G3QDY6 | Uncharacterized protein | FLKRLLQEIKTCWNKIL | 0.75 | 3 | 2.26 | 7.75 | 201 |
| F6TDR4 | Interleukin | KPLKEFLERLKSLIQKMIHQ | 0.64 | 3.5 | 2.26 | 9.66 | 202 |
| A0A093EHY0 | Interleukin-21 (Fragment) | KEFLKSFANLIKQVIR | 0.75 | 3 | 2.26 | 9.1 | 203 |
| L8I6N0 | Glycosylation-dependent cell | GKLMELGHKIMRNLENTVKE | 0.56 | 4 | 2.25 | 5.98 | 204 |
| | adhesion molecule 1 | TIKYLKSLFSHASEVVK | | | | | |
| G3KFL3 | PexRD2 | HKMKKLLRYLNY | 0.50 | 4.5 | 2.24 | 9.52 | 205 |
| Q0ZCA0 | Putative accessory gland protein | KSFSSICKELCKLCQRC | 0.75 | 3 | 2.24 | 8.7 | 206 |
| | (Fragment) | | | | | | |
| Q0ZC97 | Putative accessory gland protein | KSFSSICKELCKLCQRC | 0.75 | 3 | 2.24 | 8.64 | 207 |
| | (Fragment) | | | | | | |
| A0A091H9P3 | Interleukin-21 (Fragment) | KEFLQSFGKLINKVIR | 0.74 | 3 | 2.23 | 9.49 | 208 |
| A0A091V0J9 | Myelomonocytic growth factor (Fragment) | ILANFQRFLETAYRALRHLAR | 0.64 | 3.5 | 2.22 | 5.67 | 209 |
| A0A091J8M6 | Interleukin-21 (Fragment) | KEFLKSFAKLIQQVIR | 0.74 | 3 | 2.22 | 9.54 | 210 |
| A0A091K4W3 | Interleukin-21 (Fragment) | KEFLKSFAKLIQQVIR | 0.74 | 3 | 2.22 | 9.39 | 211 |
| A0A093PBX6 | Interleukin-21 (Fragment) | KEFLKSFAKLIQQVIR | 0.74 | 3 | 2.22 | 9.34 | 212 |
| A0A091SVN6 | Interleukin-21 (Fragment) | KEFLKSFAKLIQQVIR | 0.74 | 3 | 2.22 | 9.32 | 213 |
| U3IH11 | Interleukin | KEFLQSFSKLMKKV | 0.74 | 3 | 2.22 | 9.37 | 214 |
| A0A078J1N0 | BnaC02g44190D protein | KPLHTMVNHISRFATKMT | 0.55 | 4 | 2.21 | 4.97 | 215 |
| B3NKZ6 | Protein Turandot E (Protein Victoria) | GGKLFDVLKKIIKVI | 0.74 | 3 | 2.21 | 9.62 | 216 |
| A0A087VKZ4 | Interleukin-21 (Fragment) | KEFLQSFAKLIKQVIR | 0.73 | 3 | 2.19 | 9.34 | 217 |
| Q28540 | Interleukin-7 (IL-7) | LLQKIKTCWNKILRGITE | 0.73 | 3 | 2.19 | 8.89 | 218 |
| B9HA59 | Uncharacterized protein | RIRDVFSSIFRNIFNLFR | 0.73 | 3 | 2.19 | 10.7 | 219 |
| B6E474 | 8 kDa glycoprotein | QKIAQLVKKWIKTVLEAR | 0.54 | 4 | 2.17 | 9.78 | 220 |
| P80195 | Glycosylation-dependent cell | GKLMELGHKIMRNLENTVKE | 0.54 | 4 | 2.15 | 5.98 | 221 |
| | adhesion molecule 1 (GlyCAM-1) | TIKYLKSLFSHAFEVVKT | | | | | |
| | (28 kDa milk glycoprotein PP3) | | | | | | |
| | (Lactophorin) (Proteose-peptone | | | | | | |
| | component 3) (PP3) | | | | | | |
| S7MSM8 | Interleukin-13 | EVTRLAKDLLQQLRKGVRQGK | 0.54 | 4 | 2.15 | 9.4 | 222 |
| L5M5Z7 | Interleukin-13 | EVTRLAKDLLQQLRKGVRQGK | 0.54 | 4 | 2.15 | 9.1 | 223 |
| P0CY42 | ATP synthase protein 8 (A6L) | LPRLLRTYISRI | 0.71 | 3 | 2.14 | 10.28 | 224 |
| | (F-ATPase subunit 8) | | | | | | |
| P0CY41 | ATP synthase protein 8 (A6L) | LPRLLRTYISRI | 0.71 | 3 | 2.14 | 10.28 | 225 |
| | (F-ATPase subunit 8) | | | | | | |
| K0KI76 | Putative secreted protein | LKKLNQIVQKFHQLLQG | 0.61 | 3.5 | 2.14 | 4.85 | 226 |
| T1PF69 | Dynein heavy chain and region D6 | DFKNLIRKCVDVARKV | 0.71 | 3 | 2.14 | 8.71 | 227 |
| | of dynein motor | | | | | | |
| W2HGG0 | Uncharacterized protein | NATTYLKEALSRFKSWLKR | 0.53 | 4 | 2.13 | 10.07 | 228 |
| V9FSC7 | Uncharacterized protein | NATTYLKEALSRFKSWLKR | 0.53 | 4 | 2.13 | 10.07 | 229 |
| A0A081AW62 | Uncharacterized protein | NATTYLKEALSRFKSWLKR | 0.53 | 4 | 2.13 | 9.98 | 230 |
| P36925 | Interleukin-8 (IL-8) (C-X-C | KWVQKVVQAFLKRAEK | 0.53 | 4 | 2.12 | 9.03 | 231 |
| | motif chemokine 8)(Chemokine | | | | | | |
| | (C-X-C motif) ligand 8) | | | | | | |
| K7FKJ3 | Uncharacterized protein | ARKMVTRALRALQN | 0.53 | 4 | 2.12 | 8.24 | 232 |
| F7I3A3 | Interleukin | KEFLERFKSLLQKMIHR | 0.60 | 3.5 | 2.11 | 9.25 | 233 |
| Q9TJR5 | 50S ribosomal protein L32, plastid | AKKALAKAKTVLK | 0.42 | 5 | 2.10 | 11.45 | 234 |
| W2IIM7 | Uncharacterized protein | NGLWQRFLRWWNRLFTG | 0.70 | 3 | 2.10 | 10.1 | 235 |
| W2VQV4 | Uncharacterized protein | NGLWQRFLRWWNRLFTG | 0.70 | 3 | 2.10 | 10.1 | 236 |
| V9EMI9 | Uncharacterized protein | NGLWQRFLRWWNRLFTG | 0.70 | 3 | 2.10 | 10.1 | 237 |
| D0N532 | Putative uncharacterized protein | ATKLSDAMQRIKTMFRNWYQK | 0.52 | 4 | 2.09 | 10.19 | 238 |
| P46690 | Gibberellin-regulated protein 4 | CITFCNKCCRKCL | 0.70 | 3 | 2.09 | 9.42 | 239 |
| | (GAST1 protein homolog 4) | | | | | | |
| C5YGU9 | Putative uncharacterized protein | CCDLIRKCWHDIKECWKRC | 0.83 | 2.5 | 2.08 | 9.02 | 240 |
| | Sb07g003410 | | | | | | |
| Q9GKA2 | Erythropoietin | KLFRIYSNFLRG | 0.69 | 3 | 2.08 | 8.89 | 241 |
| Q6H8T1 | Erythropoietin | KLFRIYSNFLRG | 0.69 | 3 | 2.08 | 8.74 | 242 |
| Q6H8S9 | Erythropoietin | KLFRIYSNFLRG | 0.69 | 3 | 2.08 | 8.74 | 243 |
| Q6H8T0 | Erythropoietin | KLFRIYSNFLRG | 0.69 | 3 | 2.08 | 8.74 | 244 |
| P33708 | Erythropoietin | KLFRIYSNFLRG | 0.69 | 3 | 2.08 | 8.68 | 245 |
| Q6H8T2 | Erythropoietin | KLFRIYSNFLRG | 0.69 | 3 | 2.08 | 8.42 | 246 |
| Q867B1 | Erythropoietin | KLFRIYSNFLRG | 0.69 | 3 | 2.08 | 8.35 | 247 |
| D7KU31 | Putative uncharacterized protein | EKFESCMKKCSKICNK | 0.69 | 3 | 2.08 | 6.62 | 248 |
| Q0Z956 | Erythropoietin | KLFRVYSNFLRG | 0.69 | 3 | 2.08 | 9.03 | 249 |
| P29676 | Erythropoietin | KLFRVYSNFLRG | 0.69 | 3 | 2.08 | 8.73 | 250 |
| Q28513 | Erythropoietin | KLFRVYSNFLRG | 0.69 | 3 | 2.08 | 8.35 | 251 |
| P07865 | Erythropoietin | KLFRVYSNFLRG | 0.69 | 3 | 2.08 | 8.35 | 252 |
| P38215 | Putative uncharacterized protein | RKLYHRVGTCIQNIF | 0.59 | 3.5 | 2.07 | 6.07 | 253 |
| | YBR013C | | | | | | |
| P06759 | Apolipoprotein C-III (Apo-CIII) | FKSLKGYWSKFT | 0.69 | 3 | 2.07 | 4.36 | 254 |
| | (ApoC-III) (Apolipoprotein C3) | | | | | | |
| B1GVZ6 | Interleukin 7 | ISSLRSCWNKFEKIISR | 0.69 | 3 | 2.06 | 8.91 | 255 |
| A8MRM1 | Protein RALF-like 16 | VNHYHRGCEKITRCARDA | 0.51 | 4 | 2.06 | 8.45 | 256 |
| | | ARY | | | | | |
| U3K1R5 | Uncharacterized protein | ISSLRSCWNKFEKLISR | 0.69 | 3 | 2.06 | 8.91 | 257 |
| R4WCP1 | Cysteine rich secreted protein | CCRKVVKYWTHCCQEGLRCT | 0.59 | 3.5 | 2.06 | 8.72 | 258 |
| C1MNQ9 | Predicted protein | GRTFRSCARTAFRTAKL | 0.41 | 5 | 2.05 | 6.79 | 259 |
| P07321 | Erythropoietin | KLFRVYANFLRG | 0.68 | 3 | 2.05 | 7.87 | 260 |
| A0A061DMT2 | Uncharacterized protein | YGRGCRRCCSYL | 0.68 | 3 | 2.05 | 7.78 | 261 |
| F6PXB2 | Uncharacterized protein | FLKRLLQEIKTCWNKILSG | 0.68 | 3 | 2.03 | 8.71 | 262 |
| F6PXS2 | Uncharacterized protein (Fragment) | FLKRLLQEIKTCWNKILSG | 0.68 | 3 | 2.03 | 6.91 | 263 |
| F6PXG8 | Uncharacterized protein (Fragment) | FLKRLLQEIKTCWNKILSG | 0.68 | 3 | 2.03 | 5.68 | 264 |
| A0A094ICS8 | Uncharacterized protein | SVARHAARDLRRWM | 0.58 | 3.5 | 2.01 | 9.67 | 265 |
| F6U832 | Uncharacterized protein | LLQKIKTCWNKILRDAKE | 0.67 | 3 | 2.01 | 8.7 | 266 |
| P09641 | Peptide YY-like (PYY) | WAKYHAAVRHYVNLITR | 0.50 | 4 | 2.01 | 8.39 | 267 |
| P81028 | Peptide YY-like (PYY) | WAKYHAAVRHYVNLITR | 0.50 | 4 | 2.01 | 8.35 | 268 |
| G3VIZ8 | Uncharacterized protein | EEVFKKFKKVAKSFG | 0.67 | 3 | 2.01 | 7.83 | 269 |
| O61466 | FMRFamide-like neuropeptides 5 | FGRAGAKFIRFGRS | 0.50 | 4 | 2.00 | 11.17 | 270 |
| | [Cleaved into: APKPKFIRF-amide; | | | | | | |
| | AGAKFIRF-amide; GAKFIRF-amide] | | | | | | |
| C4V9A1 | Putative uncharacterized protein | DLKTLFTTIWKFIKK | 0.67 | 3 | 2.00 | 6.31 | 271 |
| P86730 | Perlwapin (Fragment) | KKCCGGCPRLCEK | 0.67 | 3 | 2.00 | 8.45 | 272 |
| A8MQM7 | Protein RALF-like 15 | KQVANPYRRGCGTIERCR | 0.49 | 4 | 1.97 | 9.96 | 273 |
| H3FNG9 | Uncharacterized protein | SDAKKLMRDLKRML | 0.66 | 3 | 1.97 | 5.38 | 274 |
| Q29614 | Beta-lactoglobulin (Beta-LG) | NKGMNEFKKILRTLA | 0.65 | 3 | 1.95 | 5.56 | 275 |
| Q7M747 | Secretoglobin family 2B member | FTKIKDALKKISQ | 0.65 | 3 | 1.95 | 6.11 | 276 |
| | 24 (Allergen dI chain C2B) | | | | | | |
| | (Androgen-binding protein zeta) | | | | | | |
| | (Lacrimal androgen-binding protein zeta) | | | | | | |
| P15457 | 2S seed storage protein 1 (2S | VRKIYQTAKHLP | 0.56 | 3.5 | 1.95 | 10.44 | 277 |
| | albumin storage protein) (NWMU2-2S | | | | | | |
| | albumin 1) [Cleaved into: 2S | | | | | | |
| | seed storage protein 1 small | | | | | | |
| | subunit; 2S seed storage | | | | | | |
| | protein 1 large subunit] | | | | | | |
| Q0V822 | Protein RALF-like 26 | VHNYSRGCSRITRCR | 0.43 | 4.5 | 1.95 | 11.19 | 278 |
| J9P346 | Uncharacterized protein | KIKRIVQKILESAER | 0.65 | 3 | 1.95 | 8.73 | 279 |
| P49164 | 50S ribosomal protein L34, chloroplastic | ARMATKLGRKVLN | 0.48 | 4 | 1.93 | 12.23 | 280 |
| A5WYF5 | Putative 4.8 kDa secreted salivary | KTLVNLWSKLAQRIF | 0.64 | 3 | 1.93 | 4.53 | 281 |
| | gland protein | | | | | | |
| Q9GZZ8 | Extracellular glycoprotein lacritin | QALAKAGKGMHGGVPGGKQ | 0.43 | 4.5 | 1.93 | 5.17 | 282 |
| | | FIENGSEFAQKLLKKF | | | | | |
| Q9FZA0 | Protein RALF-like 4 | NPYRRGCSAITHCYRYAR | 0.43 | 4.5 | 1.92 | 10.76 | 283 |
| K9JHY4 | Leptin | RVKQVLNQLLKNMDHLK | 0.55 | 3.5 | 1.92 | 9.15 | 284 |
| A0A076YJS8 | Interleukin 4/13-3 | VSSFLEHVKRCVRH | 0.63 | 3 | 1.90 | 8.59 | 285 |
| A0A023G9C2 | Putative secreted protein | LRTVTELLKKVVDAAKK | 0.63 | 3 | 1.90 | 5.02 | 286 |
| B4G535 | Protein Turandot Z | AKALFNKLTEYLKK | 0.63 | 3 | 1.90 | 5.25 | 287 |
| B1MTQ2 | Interleukin 13 (Predicted) | EVAQFVKDLLRHLRKLFHQG | 0.63 | 3 | 1.89 | 9.02 | 288 |
| B0KWP3 | Interleukin 13 (Interleukin 13 | EVAQFVKDLLRHLRKLFHQG | 0.63 | 3 | 1.89 | 8.78 | 289 |
| | (Predicted)) | | | | | | |
| F7H944 | Uncharacterized protein (Fragment) | EVAQFVKDLLRHLRKLFHQG | 0.63 | 3 | 1.89 | 8.69 | 290 |
| E9Q6L3 | Methylglutaconyl-CoA hydratase, | KNLLKMLSKAVDALKS | 0.62 | 3 | 1.87 | 9.72 | 291 |
| | mitochondrial | | | | | | |
| Q9P0W0 | Interferon kappa (IFN-kappa) | LRRYFHRINFLKE | 0.74 | 2.5 | 1.86 | 8.8 | 292 |
| O82377 | EMBRYO SURROUNDING FACTOR 1-like | SRCYRSLYKCVA | 0.62 | 3 | 1.85 | 8.9 | 293 |
| | protein 6 | | | | | | |
| G3V2A7 | Type II iodothyronine deiodinase | QWLTSCWSTLMRLIHQMA | 0.53 | 3.5 | 1.84 | 10.86 | 294 |
| | | GRYR | | | | | |
| P48131 | 50S ribosomal protein L36, cyanelle | ASVRKMCEKCRTIR | 0.46 | 4 | 1.84 | 11.64 | 295 |
| Q43194 | Non-specific lipid-transfer protein | CLKNAARGIRGLN | 0.61 | 3 | 1.83 | 9.45 | 296 |
| | 2 (LTP 2) | | | | | | |
| Q0IQK9 | Non-specific lipid-transfer protein | CLKNAARGIKGLN | 0.61 | 3 | 1.83 | 9.41 | 297 |
| | 1 (LTP 1) (PAPI) | | | | | | |
| B5FW67 | Interleukin 13 (Predicted) | EVAQFIKDLLRHLKK | 0.72 | 2.5 | 1.81 | 9.42 | 298 |
| | (Uncharacterized protein) | | | | | | |
| P58784 | Trp-Contryphan-P | GGAIGKFMNVLRR | 0.60 | 3 | 1.79 | 3.8 | 299 |
| O65919 | Protein RALF-like 10 | ANEYRRGCSKITRCK | 0.45 | 4 | 1.79 | 9.69 | 300 |
| P0C0P7 | Neuropeptide S | RSFRNGVGSGVKK | 0.45 | 4 | 1.78 | 12.31 | 301 |
| G2TRK4 | Uncharacterized protein C1399.06 | TILRKARNLLNHGI | 0.51 | 3.5 | 1.78 | 10.3 | 302 |
| P86941 | Insulinotropic peptide 1 (FSIP) | AVWKDFLKNIGKAAGKAV | 0.59 | 3 | 1.78 | 8.47 | 303 |
| B4MKX9 | GK17255 | KHAHSMITSMLSFVNSVVN | 0.44 | 4 | 1.78 | 8.14 | 304 |
| | | FGRSFVRN | | | | | |
| A0A016W2T3 | Uncharacterized protein | VKKMLKDVPKLATS | 0.59 | 3 | 1.78 | 8.28 | 305 |
| Q5UW37 | VEGF coregulated chemokine 1(13.6 | RACQQFLKRCHL | 0.51 | 3.5 | 1.77 | 10.37 | 306 |
| | kDa protein) (C-X-C motif chemokine 17) | | | | | | |
| Q9GLK4 | Natriuretic peptides B (Gamma- | NVLRALRRLGSS | 0.59 | 3 | 1.77 | 7.09 | 307 |
| | brain natriuretic peptide) | | | | | | |
| | [Cleaved into: Brain natriuretic | | | | | | |
| | peptide 32(BNP-32)] | | | | | | |
| A0A074ZW10 | Uncharacterized protein | GKNWSEFVRSMLRAMSKVAA | 0.59 | 3 | 1.77 | 5.07 | 308 |
| G3T2N9 | Uncharacterized protein | ELITFMKNLLDHLRRIYR | 0.71 | 2.5 | 1.76 | 9.23 | 309 |
| Q2XPU9 | Vdg3 | ICKSFQSLVHRFGHVT | 0.58 | 3 | 1.75 | 5.32 | 310 |
| P22298 | Antileukoproteinase (ALP) (Secretory | LKCCKSMCGKVC | 0.58 | 3 | 1.75 | 9.11 | 311 |
| | leukocyte protease inhibitor) (Fragment) | | | | | | |
| O77234 | SPO-1 protein (Stage-specific | KRMEYIAKKLDK | 0.58 | 3 | 1.74 | 8.92 | 312 |
| | protein SPO-1) (Stathmin-like protein) | | | | | | |
| H2MKX6 | Uncharacterized protein | ASVVQQIQRIIRVLRS | 0.58 | 3 | 1.73 | 11.83 | 313 |
| P15696 | Interferon tau-1 (IFN-tau-1) | KRLRKMGGDLNSL | 0.58 | 3 | 1.73 | 5.74 | 314 |
| | (Antiluteolysin) (Trophoblast anti- | | | | | | |
| | luteolytic protein) (Trophoblast | | | | | | |
| | protein 1) (TP-1) (Trophoblastin) | | | | | | |
| M4WK63 | Cul o 5 allergen | KSYVEKLTKALSTIRQCI | 0.57 | 3 | 1.72 | 9.23 | 315 |
| A8CL69 | PBAN-type neuropeptides | RLGRQLHNIVDK | 0.69 | 2.5 | 1.72 | 5.5 | 316 |
| | (Pheromone/pyrokinin biosynthesis- | | | | | | |
| | activating neuropeptide) [Cleaved into: | | | | | | |
| | TSQDITSGMWFGPRL-amide (Pyrokinin-1); | | | | | | |
| | QITQFTPRL-amide (Pyrokinin-2); | | | | | | |
| | IYLPLFASRL-amide; VPWTPSPRL-amide] | | | | | | |
| F6R9B2 | Uncharacterized protein (Fragment) | SQLTNLIRSVRTVMR | 0.57 | 3 | 1.71 | 8.95 | 317 |
| Q3SYR5 | Apolipoprotein C-IV (Apo-CIV)(ApoC-IV) | LKDLGSRARAWLRS | 0.57 | 3 | 1.71 | 9.07 | 318 |
| | (Apolipoprotein C4) | | | | | | |
| P0C0P5 | Neuropeptide S | RSFRNGVGTGMKK | 0.43 | 4 | 1.71 | 12.31 | 319 |
| P0C0P6 | Neuropeptide S | RSFRNGVGTGMKK | 0.43 | 4 | 1.71 | 12.02 | 320 |
| Q6NME6 | Protein RALF-like 19 | YRRGCSVITHCYRQ | 0.49 | 3.5 | 1.71 | 10.75 | 321 |
| P07597 | Non-specific lipid-transfer protein | CLKGIARGIHNLN | 0.68 | 2.5 | 1.70 | 8.19 | 322 |
| | 1 (LIP 1) (Probable amylase/protease | | | | | | |
| | inhibitor) | | | | | | |
| Q9WVA9 | Pro-FMRFamide-related neuropeptide FF | RFGRNAWGPWSK | 0.56 | 3 | 1.69 | 9.75 | 323 |
| | (FMRFamide-related peptides) [Cleaved | | | | | | |
| | into: Neuropeptide SF (NPSF); | | | | | | |
| | Neuropeptide FF (NPFF); | | | | | | |
| | Neuropeptide AF-like (NPAF)] | | | | | | |
| Q9SRY3 | Protein RALF-like 1 (Rapid | ANPYSRGCSKIARCR | 0.42 | 4 | 1.69 | 10.06 | 324 |
| | alkalinization factor 1) (AtRALF1) | | | | | | |
| A0A024GHZ6 | Albugo candida WGS project | ILHSFLKVLHHL | 0.67 | 2.5 | 1.69 | 9.18 | 325 |
| | CAIX00000000 data, strain Ac Nc2, contig | | | | | | |
| | AcNc2_CONTIG_128_length_64418 | | | | | | |
| Q91159 | Lysozyme C(EC 3.2.1.17) (1,4-beta-N- | IKCAKKIARDAHGLT | 0.48 | 3.5 | 1.69 | 5.11 | 326 |
| | acetylmuramidase C) | | | | | | |
| Q5DF01 | SJCHGC01792 protein | VLKLWNSVLKHICNLS | 0.67 | 2.5 | 1.69 | 4.41 | 327 |
| B5L332 | CSF3 (Uncharacterized protein) | LRQLRSFMQDVFRSLRC | 0.56 | 3 | 1.68 | 8.12 | 328 |
| Q70PW6 | Peptidoglycan-recognition protein SB2 | GRHLLNELKKWP | 0.67 | 2.5 | 1.68 | 11.06 | 329 |
| | (EC 3.5.1.28) | | | | | | |
| P24296 | Non-specific lipid-transfer protein | NCLKGIARGIHNLN | 0.67 | 2.5 | 1.67 | 8.2 | 330 |
| | (LTP) (Phospholipid transfer protein) | | | | | | |
| | (PLTP) (ns-LTP1) (Fragment) | | | | | | |
| K7M000 | Uncharacterized protein | WRRVMHCFSYCW | 0.67 | 2.5 | 1.67 | 8.35 | 331 |
| P0C0P8 | Neuropeptide S | RSFRNGVGSGAKK | 0.42 | 4 | 1.66 | 12.31 | 332 |
| B9RZ82 | Putative uncharacterized protein | DLTRALHDLVKALKKAYR | 0.66 | 2.5 | 1.66 | 5.64 | 333 |
| | | TLD | | | | | |
| O46633 | Interferon tau (IFN-tau) (Antiluteolysin) | KRLRKMGGDLNS | 0.55 | 3 | 1.66 | 6.57 | 334 |
| | (Trophoblast antiluteolytic protein) | | | | | | |
| | (Trophoblast protein 1) (TP-1) | | | | | | |
| | (Trophoblastin) | | | | | | |
| A0A093R5C1 | Uncharacterized protein (Fragment) | KNATTFIEKLMTFIRKA | 0.55 | 3 | 1.66 | 7.99 | 335 |
| M3VWX3 | Uncharacterized protein (Fragment) | EVIQLVKNLLNHLRR | 0.66 | 2.5 | 1.65 | 9.42 | 336 |
| G1T948 | Interleukin (Fragment) | LKEFLERLKSLIQKMIHQ | 0.66 | 2.5 | 1.65 | 9.67 | 337 |
| O64466 | Protein RALF-like 11 | VNEYSRGCSKIHRCR | 0.47 | 3.5 | 1.65 | 8.5 | 338 |
| F4ISE1 | Protein RALF-like 12 | VNEYSRGCSKIHRCR | 0.47 | 3.5 | 1.65 | 8.5 | 339 |
| F4ISE2 | Protein RALF-like 13 | VNEYSRGCSKIHRCR | 0.47 | 3.5 | 1.65 | 8.5 | 340 |
| M4QCE6 | Adipokinetic 3 | CGQFTRLCRHFVHELKQ | 0.55 | 3 | 1.65 | 6.45 | 341 |
| | | ALTS | | | | | |
| E9NX77 | AKH/corazonin-like hormone | CGQFTRLCRHFVHELKQ | 0.55 | 3 | 1.65 | 6.44 | 342 |
| | | ALTS | | | | | |
| Q9XSN5 | Apolipoprotein C-I (Apo-CI) (ApoC-I) | DKAKKAIERIKQ | 0.55 | 3 | 1.64 | 9.11 | 343 |
| | (Apolipoprotein C1) [Cleaved into: | | | | | | |
| | Truncated apolipoprotein C-I] | | | | | | |
| R0MG91 | Uncharacterized protein | EKISDWWKRIWEKIKN | 0.82 | 2 | 1.63 | 5.34 | 344 |
| P02815 | Mucin-like protein 2 (16.5 kDa sub- | LENMKTVIKSGVEKLKNF | 0.54 | 3 | 1.63 | 3.8 | 345 |
| | mandibular gland glycoprotein) (Salivary | LQRG | | | | | |
| | protein 1) | | | | | | |
| A0A087VIJ1 | Uncharacterized protein | NATRFMEKLMTFVRKA | 0.54 | 3 | 1.62 | 8.87 | 346 |
| Q4G392 | 50S ribosomal protein L34, chloroplastic | RMATKAGRRVINAR | 0.32 | 5 | 1.62 | 12.96 | 347 |
| U3JCF4 | Uncharacterized protein (Fragment) | ILANFQRFLETAYRALRHL | 0.64 | 2.5 | 1.61 | 5.39 | 348 |
| Q9WVA8 | Pro-FMRFamide-related neuropeptide FF | RFGRSAWGSWSK | 0.54 | 3 | 1.61 | 9.47 | 349 |
| | (FMRFamide-related peptides) [Cleaved | | | | | | |
| | into: Neuropeptide SF (NPSF); Neuro- | | | | | | |
| | peptide FF (NPFF); Neuropeptide | | | | | | |
| | AF-like (NPAF)] | | | | | | |
| A0A061HZA0 | Ras-related and estrogen-regulated | THVKQAINKMLTKISS | 0.46 | 3.5 | 1.61 | 5.48 | 350 |
| | growth inhibitor-like protein | | | | | | |
| A8XRC0 | Protein CBG17503 | RELPKVCRNIFSRVSL | 0.53 | 3 | 1.60 | 5.86 | 351 |
| Q9TLU9 | 50S ribosomal protein L36, chloroplastic | ASVRKICSRCVALK | 0.40 | 4 | 1.60 | 11.48 | 352 |
| P06833 | Caltrin (Calcium transport inhibitor) | LSRYAKLANRLANP | 0.53 | 3 | 1.60 | 10.36 | 353 |
| | (Peptide YY-2) (Peptide YY2) (Seminal- | | | | | | |
| | plasmin) (SPLN) | | | | | | |
| V5IDJ5 | Putative secreted protein (Fragment) | DILRECAKGLEVRVAENQH | 0.35 | 4.5 | 1.60 | 5.86 | 354 |
| | | LANETVEYFFKKLWRGVKK | | | | | |
| | | VVKK | | | | | |
| Q94CG1 | Glycine rich protein | YGCCRKGYNGCKRCCSYAG | 0.53 | 3 | 1.59 | 8.79 | 355 |
| | | EAIDKV | | | | | |
| D2K2T8 | Glycine-rich protein | YGCCRKGYNGCKRCCSYAG | 0.53 | 3 | 1.59 | 8.79 | 356 |
| | | EAIDKV | | | | | |
| G1NDN8 | Interleukin | QEFLNSFSKLMQKVIKIH | 0.64 | 2.5 | 1.59 | 9.07 | 357 |
| A4K2W7 | WAP four-disulfide core domain protein 5 | RCLSPMNHLCHK | 0.53 | 3 | 1.59 | 8.73 | 358 |
| A4K2T2 | WAP four-disulfide core domain protein 5 | RCLSPMNHLCHK | 0.53 | 3 | 1.59 | 8.73 | 359 |
| F9X658 | Uncharacterized protein | AFNAVKRLLDQARQLGR | 0.53 | 3 | 1.58 | 9.3 | 360 |
| V5H076 | Putative secreted protein | AAKNALQKFIEEMKKIK | 0.53 | 3 | 1.58 | 6.14 | 361 |
| W2XXG7 | Uncharacterized protein | EVKKIWATIIERLYKLWRDW | 0.79 | 2 | 1.57 | 9.82 | 362 |
| P54615 | Osteocalcin-related protein (Gamma- | GLKTAYRRIYGI | 0.52 | 3 | 1.57 | 4.44 | 363 |
| | carboxyglutamic acid-containing pro- | | | | | | |
| | tein 3) (Nephrocalcin) (OC-X) | | | | | | |
| P86546 | Osteocalcin (Bone Gla protein) (BGP) | GLKTAYKRIYGI | 0.52 | 3 | 1.56 | 4.44 | 364 |
| | (Gamma-carboxyglutamic acid-containing | | | | | | |
| | protein) | | | | | | |
| P86547 | Osteocalcin-2 (Bone Gla protein 2) | GLKTAYKRIYGI | 0.52 | 3 | 1.56 | 4.44 | 365 |
| | (BGP2) (Gamma-carboxyglutamic acid- | | | | | | |
| | containing protein 2) | | | | | | |
| V9NK57 | IL-4 delta 3 | LKDFLENLKRIMQK | 0.78 | 2 | 1.56 | 9.81 | 366 |
| V5H5J7 | Putative secreted protein | QVLHQVQKLANELLRKL | 0.62 | 2.5 | 1.56 | 9.69 | 367 |
| Q8GWK5 | Gibberellin-regulated protein 9 | CHRACGSCCAKC | 0.62 | 2.5 | 1.56 | 9.36 | 368 |
| | (GAST1 protein homolog 9) | | | | | | |
| P81765 | Tyrosinase inhibitor (Phenol oxidase | QCLANGSKCYSHDVCCTKR | 0.31 | 5 | 1.56 | 8.32 | 369 |
| | inhibitor) (Phenoloxidase inhibitor) (POI) | CHNYAKKCVT | | | | | |
| A0A091LH39 | Uncharacterized protein (Fragment) | KSATTFIEKLTTFIRKAS | 0.52 | 3 | 1.55 | 8.98 | 370 |
| Q7M1H2 | Glycine-rich protein | KGYYKGCKKCCSYAGQAMD | 0.52 | 3 | 1.55 | 9.28 | 371 |
| | | KVTE | | | | | |
| A0A091FKF3 | Myelomonocytic growth factor (Fragment) | ILANFQRFLETAYRALRHLA | 0.62 | 2.5 | 1.55 | 6.57 | 372 |
| G5E3B9 | Putative udp-n-acetyl-alpha-d- | EGWSTLMRTVHSVIKR | 0.62 | 2.5 | 1.55 | 5.04 | 373 |
| | galactosamine:polypeptide n- | | | | | | |
| | acetylgalactosaminyltransferase (Fragment) | | | | | | |
| D7MAD4 | Putative uncharacterized protein | DLSSVAKTLIHRLHK | 0.51 | 3 | 1.54 | 4.77 | 374 |
| P23137 | Glycine-rich protein | YGCCRKGYNGCKRCCSYAG | 0.51 | 3 | 1.53 | 8.29 | 375 |
| | | EAMDKV | | | | | |
| Q9FXS8 | Glycine rich protein (Glycine-rich protein) | YGCCRKGYNGCKRCCSYAG | 0.51 | 3 | 1.53 | 8.27 | 376 |
| | | EAMDKV | | | | | |
| Q9LWA1 | Cell wall protein (Glycine-rich protein) | YGCCRKGYNGCKRCCSYAG | 0.51 | 3 | 1.53 | 7.8 | 377 |
| | | EAMDKV | | | | | |
| P15460 | 2S seed storage protein 4 (2S albumin | VRKIYQAAKYLP | 0.51 | 3 | 1.53 | 10.32 | 378 |
| | storage protein) (NWMU2-2S albumin 4) | | | | | | |
| | [Cleaved into: 2S seed storage protein | | | | | | |
| | 4 small subunit; 2S seed storage | | | | | | |
| | protein 4 large subunit] | | | | | | |
| A9RBU6 | Uncharacterized protein | ASQLLKVLHKIWTQVP | 0.61 | 2.5 | 1.53 | 7.13 | 379 |
| Q4XR40 | Putative uncharacterized protein (Fragment) | VALVTGAGRGIGRSIAKTL | 0.34 | 4.5 | 1.52 | 9.95 | 380 |
| | | AKSVSHVL | | | | | |
| P01740 | T-cell receptor gamma chain V region V108A | RWSSGFHKVFAEGTKLI | 0.61 | 2.5 | 1.52 | 7.92 | 381 |
| G1LH25 | Interleukin | KEFLERLKSLIQRMIHQ | 0.60 | 2.5 | 1.50 | 9.66 | 382 |
| X2FJF4 | Interleukin-4 (Fragment) | KLSNMLRNLMHLVNQ | 0.60 | 2.5 | 1.50 | 6.13 | 383 |
| I3SFC2 | Uncharacterized protein | RVIKCIDHICQYARNL | 0.60 | 2.5 | 1.50 | 6.92 | 384 |
| A7KHG0 | Nodule Cysteine-Rich (NCR) secreted | RVIKCIDHICQYARNL | 0.60 | 2.5 | 1.50 | 6.06 | 385 |
| | peptide (Nodule-specific cysteine-rich | | | | | | |
| | peptide 330) | | | | | | |
| H2PE90 | Interleukin | KEFLERFKSLLQKMIHQ | 0.60 | 2.5 | 1.50 | 9.42 | 386 |
| H2QQ45 | Interleukin | KEFLERFKSLLQKMIHQ | 0.60 | 2.5 | 1.50 | 9.42 | 387 |
| G1RE48 | Interleukin | KEFLERFKSLLQKMIHQ | 0.60 | 2.5 | 1.50 | 9.42 | 388 |
| G3QY93 | Interleukin | KEFLERFKSLLQKMIHQ | 0.60 | 2.5 | 1.50 | 9.42 | 389 |
| Q9HBE4 | Interleukin-21 (IL-21) (Zall) | KEFLERFKSLLQKMIHQ | 0.60 | 2.5 | 1.50 | 9.42 | 390 |
| F7EGQ8 | Interleukin | KEFLERFKSLLQKMIHQ | 0.60 | 2.5 | 1.50 | 9.12 | 391 |
| G7P680 | Interleukin | KEFLERFKSLLQKMIHQ | 0.60 | 2.5 | 1.50 | 9.12 | 392 |
| A0A096N144 | Uncharacterized protein | KEFLERFKSLLQKMIHQ | 0.60 | 2.5 | 1.50 | 9.12 | 393 |
| M3W5A3 | Interleukin | KEFLERLKSLIQKMIHQ | 0.60 | 2.5 | 1.50 | 9.51 | 394 |
| Q6L7I9 | Interleukin-21 (IL-21) | KEFLERLKSLIQKMIHQ | 0.60 | 2.5 | 1.50 | 9.42 | 395 |
| A2D655 | IL10 (Fragment) | HMLRDLRDAFSRVKTFF | 0.60 | 2.5 | 1.49 | 9.49 | 396 |
| A2D4R8 | IL10 (Fragment) | HMLRDLRDAFSRVKTFF | 0.60 | 2.5 | 1.49 | 9.49 | 397 |
| A2T6I1 | IL10 (Fragment) | HMLRDLRDAFSRVKTFF | 0.60 | 2.5 | 1.49 | 9.49 | 398 |
| G3SXC9 | Interleukin | KEFLERLKSLLQKMIHQ | 0.60 | 2.5 | 1.49 | 9.73 | 399 |
| A0A078GU36 | BnaCnng05800D protein | KKAASVIQKILKDFGL | 0.49 | 3 | 1.48 | 9.75 | 400 |
| M4FHC5 | Uncharacterized protein | KKAASVIQKILKDFGL | 0.49 | 3 | 1.48 | 9.75 | 401 |
| Q2V2Y3 | Putative defensin-like protein 84 | CMKKGGGHCQAYIGR | 0.42 | 3.5 | 1.48 | 8.88 | 402 |
| Q6V9X0 | Antileukoproteinase (ALP) (Secretory | GALKCCKAMCGKVC | 0.49 | 3 | 1.47 | 8.6 | 403 |
| | leukocyte protease inhibitor) | | | | | | |
| E0W4Y8 | Avh313 | KTLARWAQNAFSKLL | 0.49 | 3 | 1.47 | 10.14 | 404 |
| G5A7V2 | Putative uncharacterized protein | KTLARWAQNAFSKLL | 0.49 | 3 | 1.47 | 10.14 | 405 |
| I3MIK7 | Interleukin | KEFLERLKSLLQKMVHQ | 0.59 | 2.5 | 1.46 | 9.69 | 406 |
| P0DKV5 | Apolipoprotein C-I (Apo-CI) (ApoC-I) | DKVREFFKRIKE | 0.73 | 2 | 1.46 | 8.28 | 407 |
| | (Apolipoprotein C1) [Cleaved into: | | | | | | |
| | Truncated apolipoprotein C-I] | | | | | | |
| Q66KU1 | C-type lectin domain family 3 member | GKWVDEVCRSLKKYI | 0.73 | 2 | 1.46 | 8.96 | 408 |
| | A homolog (C-type lectin superfamily | | | | | | |
| | member 1 homolog) | | | | | | |
| A0A078FAD2 | BnaA09g39310D protein | SAMERLNNWLKTFKH | 0.58 | 2.5 | 1.45 | 7.98 | 409 |
| H0GIJ2 | YJL160C-like protein | VVSHIVSQIGDGQLQITTA | 0.32 | 4.5 | 1.44 | 9.06 | 410 |
| | | KKCCHKVHNCCSK | | | | | |
| L7JS03 | Uncharacterized protein (Fragment) | RRCVNNFDDVFNSVFRKL | 0.72 | 2 | 1.44 | 7.82 | 411 |
| D7REK7 | Interleukin-4 | STLRDFLERLKKIMKE | 0.72 | 2 | 1.44 | 9.46 | 412 |
| Q865X5 | Interleukin-4 (IL-4) (B-cell stimulatory | STLRDFLERLKKIMKE | 0.72 | 2 | 1.44 | 9.46 | 413 |
| | factor 1) (BSF-1) (Lymphocyte | | | | | | |
| | stimulatory factor 1) | | | | | | |
| P51744 | Interleukin-4 (IL-4) (B-cell stimulatory | LKNLLERLKTIMKE | 0.72 | 2 | 1.44 | 9.51 | 414 |
| | factor 1) (BSF-1) (Lymphocyte stimulatory | | | | | | |
| | factor 1) | | | | | | |
| Q9EQ14 | Interleukin-23 subunit alpha (IL-23 | SKILRSLQAFLAIAARV | 0.41 | 3.5 | 1.43 | 5.85 | 415 |
| | subunit alpha) (IL-23 -A) (Interleukin- | FAHGAA | | | | | |
| | 23 subunit p19) (IL-23p19) | | | | | | |
| Q91Z84 | Interleukin-23 subunit alpha (IL-23 | SKILRSLQAFLAIAARV | 0.41 | 3.5 | 1.43 | 5.63 | 416 |
| | subunit alpha) (IL-23 -A) (Interleukin-23 | FAHGAA | | | | | |
| | subunit p19) (IL-23p19) | | | | | | |
| P06307 | Cholecystokinin (CCK) [Cleaved into: | AHLGALLARYIQQARKA | 0.41 | 3.5 | 1.43 | 9.7 | 417 |
| | Cholecystokinin-58 (CCK58); Cholecysto- | | | | | | |
| | kinin-58 desnonopeptide ((1-49)-CCK58); | | | | | | |
| | Cholecystokinin-39 (CCK39); Chole- | | | | | | |
| | cystokinin-33 (CCK33); Cholecystokinin- | | | | | | |
| | 25 (CCK25); Cholecystokinin-18 (CCK18); | | | | | | |
| | Cholecystokinin-12 (CCK12); Chole- | | | | | | |
| | cystokinin-8 (CCK8); Cholecystokinin-7 | | | | | | |
| | (CCK7); Cholecystokinin-5 (CCK5)] | | | | | | |
| Q3E7Z9 | Uncharacterized protein YOL038C-A | MKYMGSFLRKAAT | 0.48 | 3 | 1.43 | 11.76 | 418 |
| P32648 | VIP peptides [Cleaved into: Intestinal | AVKKYLNSILNGK | 0.48 | 3 | 1.43 | 6.76 | 419 |
| | peptide PHI-42; Intestinal peptide PHI-27 | | | | | | |
| | (Peptide histidine isoleucinamide 27); | | | | | | |
| | Vasoactive intestinal peptide (VIP) | | | | | | |
| | (Vasoactive intestinal polypeptide)] | | | | | | |
| P01282 | VIP peptides [Cleaved into: Intestinal | AVKKYLNSILNGK | 0.48 | 3 | 1.43 | 6.76 | 420 |
| | peptide PHV-42 (Peptide histidine valine | | | | | | |
| | 42); Intestinal peptide PHM-27 (Peptide | | | | | | |
| | histidine methioninamide 27); Vasoactive | | | | | | |
| | intestinal peptide (VIP) (Vasoactive | | | | | | |
| | intestinal polypeptide)] | | | | | | |
| P01283 | VIP peptides [Cleaved into: Intestinal | AVKKYLNSILNGK | 0.48 | 3 | 1.43 | 6.76 | 421 |
| | peptide PHV-42; Intestinal peptide PHI-27 | | | | | | |
| | (Peptide histidine isoleucinamide 27); | | | | | | |
| | Vasoactive intestinal peptide (VIP) | | | | | | |
| | (Vasoactive intestinal polypeptide)] | | | | | | |
| P81401 | VIP peptides [Cleaved into: Intestinal | AVKKYLNSILNGK | 0.48 | 3 | 1.43 | 6.75 | 422 |
| | peptide PHI-27 (Peptide histidine iso- | | | | | | |
| | leucinamide 27); Vasoactive intestinal | | | | | | |
| | peptide (VIP) (Vasoactive intestinal poly- | | | | | | |
| | peptide)] | | | | | | |
| Q76LU5 | Interleukin-21 (IL-21) | KEYLERLKSLIQKMIHQ | 0.57 | 2.5 | 1.43 | 9.46 | 423 |
| C7BVU1 | Putative DNA-binding response regulator | KNVVEDIKKILQKMW | 0.71 | 2 | 1.43 | 4.56 | 424 |
| | CreB | | | | | | |
| Q2V4J2 | Putative defensin-like protein 26 | QRCNRWCHNGCGNGKGGYY | 0.29 | 5 | 1.43 | 8.46 | 425 |
| | | KSMSHGGQ | | | | | |
| H0VLF2 | Interleukin | REFLERMKSLLQKMIHQ | 0.57 | 2.5 | 1.42 | 9.61 | 426 |
| D2HN52 | Interleukin (Fragment) | KEFLERLKSLIQRV | 0.71 | 2 | 1.42 | 9.66 | 427 |
| P01213 | Proenkephalin-B (Beta-neoendorphin- | EDLYKRYGGFLRRI | 0.71 | 2 | 1.42 | 6.1 | 428 |
| | dynorphin) (Preprodynorphin) [Cleaved | | | | | | |
| | into: Alpha-neoendorphin; Beta-neoendor- | | | | | | |
| | phin; Big dynorphin (Big Dyn); Dynorphin | | | | | | |
| | A(1-17) (Dyn-A17) (Dynorphin A); Dynorphin | | | | | | |
| | A(1-13); Dynorphin A(1-8); Leu-enkephalin; | | | | | | |
| | Rimorphin (Dynorphin B) (Dyn-B) (Dynorphin | | | | | | |
| | B(1-13)); Leumorphin (Dynorphin B-29)] | | | | | | |
| P24514 | Chorion protein S18 | SSVAGVAKKGYRK | 0.35 | 4 | 1.42 | 9.82 | 429 |
| W9R9I1 | Uncharacterized protein | RRLLEAAKEIVSLMHK | 0.56 | 2.5 | 1.41 | 5.9 | 430 |
| G4LYD1 | MEG-5 | KTLGTAFKTLLHNLWDLLKQ | 0.56 | 2.5 | 1.40 | 8.18 | 431 |
| R7ULK2 | Uncharacterized protein (Fragment) | LIKRFSTLWRDIWQVASNF | 0.70 | 2 | 1.40 | 5.75 | 432 |
| P55030 | Interleukin-4 (IL-4) (B-cell stimulatory | LKDFLERLKAIMQK | 0.70 | 2 | 1.40 | 9.57 | 433 |
| | factor 1) (BSF-1) (Lymphocyte stimulatory | | | | | | |
| | factor 1) | | | | | | |
| Q3ECL0 | Protein RALF-like 9 | ANPYQRGCEKINRCR | 0.46 | 3 | 1.39 | 9.3 | 434 |
| B4LKD2 | GJ20154 | CRVARDFLRECMQHLKY | 0.56 | 2.5 | 1.39 | 5.49 | 435 |
| O95968 | Secretoglobin family 1D member 1 | KTLGKIAEKCDR | 0.69 | 2 | 1.39 | 9.47 | 436 |
| | (Lipophilin-A) | | | | | | |
| Q2V392 | Putative defensin-like protein 25 | QRCNRWCHNGCGNGKG | 0.40 | 3.5 | 1.39 | 8.39 | 437 |
| J7HBR9 | Maxadilan related protein | SKAKDAIAGLFTKAKSAL | 0.46 | 3 | 1.38 | 9.78 | 438 |
| | | KDVL | | | | | |
| M3Z119 | Interleukin | KEFLERLKSLIQRMI | 0.69 | 2 | 1.38 | 9.37 | 439 |
| Q9TV67 | Interferon gamma (IFN-gamma) | RKAISELIRVMKDL | 0.69 | 2 | 1.38 | 9.8 | 440 |
| Q22T52 | Transmembrane protein, putative | KTIQSWLNKFLSCLHI | 0.55 | 2.5 | 1.38 | 7.7 | 441 |
| P0C5M1 | Uncharacterized protein YDR371C-A | MSAIVKVVSNIIRPL | 0.69 | 2 | 1.38 | 9.99 | 442 |
| D3GGX2 | Interleukin | QEFLNSFSKLMQKLFKN | 0.68 | 2 | 1.37 | 9.32 | 443 |
| Q58IU6 | Interleukin | QEFLNSFSKLMQKLFKN | 0.68 | 2 | 1.37 | 9.3 | 444 |
| L7MA95 | Putative secreted peptide | ADKCLRYLLKNI | 0.68 | 2 | 1.37 | 9.59 | 445 |
| A0CK36 | Chromosome undetermined scaffold_2, | FKNCVKNILKDCQT | 0.68 | 2 | 1.36 | 5.87 | 446 |
| | whole genome shotgun sequence | | | | | | |
| A0A061J336 | Pterin-4-alpha-carbinolamine dehydratase | LARRMNEVFKEMLRP | 0.68 | 2 | 1.36 | 6.19 | 447 |
| C4R2P5 | Long chronological lifespan protein 2 | CKWVEKAWKGLL | 0.68 | 2 | 1.35 | 5.24 | 448 |
| P05105 | Lysozyme (EC 3.2.1.17) (1,4-beta-N- | ISVAATCAKKIYK | 0.45 | 3 | 1.35 | 8.8 | 449 |
| | acetylmuramidase) | | | | | | |
| F4PF44 | Putative uncharacterized protein (Fragment) | NELKELVKKASDIIKK | 0.67 | 2 | 1.34 | 5 | 450 |
| P14730 | WAP four-disulfide core domain protein | NIQKCCSNGCGHVCK | 0.54 | 2.5 | 1.34 | 8.77 | 451 |
| | 18 (Extracellular peptidase inhibitor) | | | | | | |
| | (Protein WDNM1) (Fragment) | | | | | | |
| H3GQQ3 | Uncharacterized protein | NGLLQRIQSWWKNLFQHGAS | 0.54 | 2.5 | 1.34 | 9.29 | 452 |
| V9NJM6 | IL-4 delta 3 | TTLKDFLENLKRIMQK | 0.67 | 2 | 1.34 | 8.85 | 453 |
| A7KH73 | Nodule Cysteine-Rich (NCR) secreted | FREIPQCINSICKCMKG | 0.67 | 2 | 1.34 | 6.5 | 454 |
| | peptide (Nodule-specific cysteine-rich | | | | | | |
| | peptide 54) (Uncharacterized protein) | | | | | | |
| P48617 | Erythropoietin | DALSKLFRIYSNFLRG | 0.67 | 2 | 1.33 | 8.68 | 455 |
| P33709 | Erythropoietin | DALSKLFRIYSNFLRG | 0.67 | 2 | 1.33 | 8.68 | 456 |
| Q6QN06 | Matrix Gla protein (MGP) | GYNAAYNRYFRK | 0.44 | 3 | 1.33 | 9.39 | 457 |
| P08493 | Matrix Gla protein (MGP) (Cell growth- | GYNAAYNRYFRK | 0.44 | 3 | 1.33 | 8.66 | 458 |
| | inhibiting gene 36 protein) | | | | | | |
| W7XBW1 | Uncharacterized protein | DSIFSKMYNCWRKCA | 0.67 | 2 | 1.33 | 6.29 | 459 |
| P33622 | Apolipoprotein C-III (Apo-CIII) (ApoC-III) | FRFLKGYWSKFTD | 0.66 | 2 | 1.33 | 4.35 | 460 |
| | (Apolipoprotein C3) | | | | | | |
| W5U2R0 | Pro-sepiatocin | QELFSLLKRLINKVN | 0.66 | 2 | 1.32 | 8.35 | 461 |
| W5U1W8 | Sepiatocin | QELFSLLKRLINKVN | 0.66 | 2 | 1.32 | 7.92 | 462 |
| Q4TJ01 | Chromosome undetermined SCAF1215, whole | KLIDTVIKQLRNLIAT | 0.66 | 2 | 1.32 | 10.1 | 463 |
| | genome shotgun sequence | | | | | | |
| G1QEP5 | Uncharacterized protein (Fragment) | LLEKIKTCWNKILSGT | 0.66 | 2 | 1.32 | 8.48 | 464 |
| P0C7P5 | Bradykinin-potentiating and C-type | GGGGGGGGGARRMKGLAKKAM | 0.26 | 5 | 1.32 | 11 | 465 |
| | natriuretic peptides (BPP-CNP) [Cleaved | | | | | | |
| | into: Bradykinin-potentiating peptide Tf1; | | | | | | |
| | Bradykinin-potentiating peptide Tf2; | | | | | | |
| | Bradykinin-potentiating peptide Tf3; C- | | | | | | |
| | type natriuretic peptide Tf-CNP; C-type | | | | | | |
| | natriuretic peptide Tf-CNP(3-22); C-type | | | | | | |
| | natriuretic peptide Tf-CNP(6-22)] | | | | | | |
| B7EY37 | cDNA clone:001-127-H01, full insert | AAWFQFFNRFLKYITSL | 0.66 | 2 | 1.32 | 11.79 | 466 |
| | sequence | | | | | | |
| G5ASQ0 | Interleukin-4 | TTLKDFLENLKTILKK | 0.66 | 2 | 1.31 | 8.78 | 467 |
| Q9FHA6 | Protein RALF-like 34 | VHPYSRGCSSITRCR | 0.37 | 3.5 | 1.31 | 10.63 | 468 |
| F7GL96 | Uncharacterized protein (Fragment) | LQSILELVHRVLRHLAQ | 0.65 | 2 | 1.30 | 7.89 | 469 |
| H9KY95 | Uncharacterized protein (Fragment) | LQSFLELVHRVLRHLAQ | 0.65 | 2 | 1.30 | 6.4 | 470 |
| Q03461 | Non-specific lipid-transfer protein 2 | CLKSAANAIKGI | 0.65 | 2 | 1.30 | 9.16 | 471 |
| | (LTP 2) | | | | | | |
| V4MH62 | Uncharacterized protein | SVYAQLSSVARTMIKRLEHFI | 0.52 | 2.5 | 1.30 | 8.52 | 472 |
| P63291 | Vasoactive intestinal peptide (VIP) | AVKKYLNSILN | 0.65 | 2 | 1.29 | 9.82 | 473 |
| | (Vasoactive intestinal polypeptide) | | | | | | |
| P63290 | Vasoactive intestinal peptide (VIP) | AVKKYLNSILN | 0.65 | 2 | 1.29 | 9.82 | 474 |
| | (Vasoactive intestinal polypeptide) | | | | | | |
| P84488 | Vasoactive intestinal peptide (VIP) | AVKKYLNSILN | 0.65 | 2 | 1.29 | 9.82 | 475 |
| | (Vasoactive intestinal polypeptide) | | | | | | |
| P63289 | Vasoactive intestinal peptide (VIP) | AVKKYLNSILN | 0.65 | 2 | 1.29 | 9.82 | 476 |
| | (Vasoactiveintestinal polypeptide) | | | | | | |
| V5HF12 | Putative secreted protein | QVGQILRECAKNLKN | 0.65 | 2 | 1.29 | 4.75 | 477 |
| P01581 | Interferon gamma (IFN-gamma) | HKAVNELIRVIHQL | 0.65 | 2 | 1.29 | 9.48 | 478 |
| L7M2P0 | Uncharacterized protein | RLLHGLLHSLLHSFSH | 0.23 | 5.5 | 1.29 | 9.84 | 479 |
| | | KFLDSFMRHMCTVCRNM | | | | | |
| D8TM42 | Putative uncharacterized protein | YWIHMLRYVAKT | 0.52 | 2.5 | 1.29 | 9.58 | 480 |
| P13589 | Pituitary adenylate cyclase-activating | AVKKYLAAVLGK | 0.43 | 3 | 1.29 | 5.61 | 481 |
| | polypeptide (PACAP) [Cleaved into: PACAP- | | | | | | |
| | related peptide (PRP-48); Pituitary | | | | | | |
| | adenylate cyclase-activating poly- | | | | | | |
| | peptide 27 (PACAP-27) (PACAP27); Pitui- | | | | | | |
| | tary adenylate cyclase-activating poly- | | | | | | |
| | peptide 38 (PACAP-38) (PACAP38)] | | | | | | |
| P41535 | Pituitary adenylate cyclase-activating | AVKKYLAAVLGK | 0.43 | 3 | 1.29 | 5.57 | 482 |
| | polypeptide (PACAP) [Cleaved into: PACAP- | | | | | | |
| | related peptide (PRP-48); Pituitary | | | | | | |
| | adenylate cyclase-activating poly- | | | | | | |
| | peptide 27 (PACAP-27) (PACAP27); Pitui- | | | | | | |
| | tary adenylate cyclase-activating poly- | | | | | | |
| | peptide 38(PACAP-38) (PACAP38)] | | | | | | |
| P16613 | Pituitary adenylate cyclase-activating | AVKKYLAAVLGK | 0.43 | 3 | 1.29 | 5.54 | 483 |
| | polypeptide (PACAP) [Cleaved into: PACAP- | | | | | | |
| | related peptide (PRP-48); Pituitary | | | | | | |
| | adenylate cyclase-activating poly- | | | | | | |
| | peptide 27 (PACAP-27) (PACAP27); Pitui- | | | | | | |
| | tary adenylate cyclase-activating poly- | | | | | | |
| | peptide 38 (PACAP-38) (PACAP38)] | | | | | | |
| P18509 | Pituitary adenylate cyclase-activating | AVKKYLAAVLGK | 0.43 | 3 | 1.29 | 5.38 | 484 |
| | polypeptide (PACAP) [Cleaved into: | | | | | | |
| | PACAP-related peptide (PRP-48); | | | | | | |
| | Pituitary adenylate cyclase-activating | | | | | | |
| | polypeptide 27 (PACAP-27) (PACAP27); | | | | | | |
| | Pituitary adenylate cyclase-activating | | | | | | |
| | polypeptide 38 (PACAP-38) (PACAP38)] | | | | | | |
| O70176 | Pituitary adenylate cyclase-activating | AVKKYLAAVLGK | 0.43 | 3 | 1.29 | 5 | 485 |
| | polypeptide (PACAP) [Cleaved into: PACAP- | | | | | | |
| | related peptide (PRP-48); Pituitary aden- | | | | | | |
| | ylate cyclase-activating polypeptide 27 | | | | | | |
| | (PACAP-27)(PACAP27); Pituitary adenylate | | | | | | |
| | cyclase-activating polypeptide | | | | | | |
| | 38 (PACAP-38) (PACAP38)] | | | | | | |
| Q29W19 | Pituitary adenylate cyclase-activating | AVKKYLAAVLGK | 0.43 | 3 | 1.29 | 4.91 | 486 |
| | polypeptide(PACAP) [Cleaved into: PACAP- | | | | | | |
| | related peptide (PRP-48); Pituitary aden- | | | | | | |
| | ylate cyclase-activating polypeptide 27 | | | | | | |
| | (PACAP-27) (PACAP27);Pituitary adenylate | | | | | | |
| | cyclase-activating polypeptide | | | | | | |
| | 38 (PACAP-38) (PACAP38)] | | | | | | |
| P41534 | Glucagon family neuropeptides [Cleaved | AVKKYLAAVLGK | 0.43 | 3 | 1.29 | 9.4 | 487 |
| | into: Growth hormone-releasing factor 1-46 | | | | | | |
| | (GRF) (Growth hormone-releasing hormone) | | | | | | |
| | (GHRH); Pituitary adenylate cyclase-acti- | | | | | | |
| | vating polypeptide 27 (PACAP-27)(PACAP27); | | | | | | |
| | Pituitary adenylate cyclase-activating | | | | | | |
| | polypeptide 38 (PACAP-38) (PACAP38)] | | | | | | |
| P41585 | Glucagon family neuropeptides [Cleaved | AVKKYLAAVLGK | 0.43 | 3 | 1.29 | 9.31 | 488 |
| | into: Growth hormone-releasing factor | | | | | | |
| | (GRF) (Growth hormone-releasing hormone) | | | | | | |
| | (GHRH); Pituitary adenylate cyclase- | | | | | | |
| | activating polypeptide (PACAP)] | | | | | | |
| Q09169 | Glucagon family neuropeptides [Cleaved | AVKKYLAAVLGK | 0.43 | 3 | 1.29 | 6.28 | 489 |
| | into: Growth hormone-releasing factor (GRF) | | | | | | |
| | (Growth hormone-releasing hormone) (GHRH); | | | | | | |
| | Pituitaryadenylate cyclase-activating | | | | | | |
| | polypeptide 27 (PACAP-27) (PACAP27); | | | | | | |
| | Pituitary adenylate cyclase-activating | | | | | | |
| | polypeptide 38 (PACAP-38) (PACAP38)] | | | | | | |
| V9LKT2 | Interleukin | LKKFLQFIYYCC | 0.64 | 2 | 1.28 | 5.61 | 490 |
| D0N540 | Secreted RxLR effector peptide protein, | LSDAKQWIKTMFKNW | 0.64 | 2 | 1.28 | 5.96 | 491 |
| | putative (Fragment) | | | | | | |
| C9X4J0 | Bradykinin-potentiating peptide (BPP) | AKGKQMLKEYANKV | 0.43 | 3 | 1.28 | 10 | 492 |
| | (TdBPP) | | | | | | |
| P42692 | Somatoliberin (Growth hormone-releasing | GMFNKAYRKALGQLSA | 0.43 | 3 | 1.28 | 9.31 | 493 |
| | factor) (GRF) (Growth hormone-releasing | | | | | | |
| | hormone) (GHRH) | | | | | | |
| A8MQI8 | Protein RALF-like 5 | GGLSTWKKLLDTILKIP | 0.64 | 2 | 1.27 | 9.79 | 494 |
| A2ZAS9 | Non-specific lipid-transfer protein 3 | CLKNMASSFRNLN | 0.63 | 2 | 1.27 | 8.92 | 495 |
| | (LTP 3) | | | | | | |
| Q2QYL3 | Non-specific lipid-transfer protein 3 | CLKNMASSFRNLN | 0.63 | 2 | 1.27 | 8.92 | 496 |
| | (LTP 3) | | | | | | |
| L0GB04 | La1-like protein 15 | VTCASQALKRGCKSV | 0.42 | 3 | 1.27 | 9.03 | 497 |
| G1TIN8 | Uncharacterized protein | CSSWPHLLREILRAARL | 0.51 | 2.5 | 1.27 | 7.83 | 498 |
| O35735 | Interferon gamma (IFN-gamma) | RKAVSELKKVMNDLL | 0.63 | 2 | 1.27 | 9.84 | 499 |
| B4LY36 | GJ24431 | GQVRNFGNACEKIVHSCKTG | 0.51 | 2.5 | 1.26 | 5.29 | 500 |
| Q99935 | Opiorphin prepropeptide (Basic proline- | AFKSFWQKLFAIFG | 0.63 | 2 | 1.26 | 10.7 | 501 |
| | rich lacrimal protein) (Proline-rich pro- | | | | | | |
| | tein 1) (PRL1) [Cleaved into: Opiorphin] | | | | | | |
| P02659 | Apovitellenin-1 (Apo-VLDL-II) (Apo-II) | ARLTKLAEQLMEKIKNLC | 0.63 | 2 | 1.26 | 9.21 | 502 |
| | (Apovitellenin I) (Very low density lipo- | | | | | | |
| | protein II) | | | | | | |
| Q9YGI2 | Probable weak neurotoxin NNAM1 | GKRYIRGCADTC | 0.63 | 2 | 1.26 | 8.99 | 503 |
| O49320 | Protein RALF-like 18 | NKYRRGCSAATGCYRF | 0.32 | 4 | 1.26 | 9.7 | 504 |
| Q29146 | Beta-lactoglobulin (Beta-LG) | NKGMEEFKKIVRTLT | 0.63 | 2 | 1.26 | 4.91 | 505 |
| Q9TWH3 | Venom peptide isomerase light chain | VATVKNCGKKLLAT | 0.42 | 3 | 1.26 | 9.79 | 506 |
| A1YEU0 | IL10 (Fragment) | NMLRDLRDAFSRVKTFF | 0.63 | 2 | 1.26 | 7.99 | 507 |
| Q6LBF4 | Interleukin-10 (Fragment) | NMLRDLRDAFSRVKTFF | 0.63 | 2 | 1.26 | 7.97 | 508 |
| Q9BDX4 | Interleukin-3 (IL-3) (Hematopoietic growth | RKLKKYLEALDNFLNF | 0.63 | 2 | 1.26 | 5.45 | 509 |
| | factor) (Mast cell growth factor) (MCGF) | | | | | | |
| | (Multipotential colony-stimulating factor) | | | | | | |
| | (P-cell-stimulating factor) | | | | | | |
| Q29FI2 | GA12182 | KHAHSMITSMLTFVSSVM | 0.42 | 3 | 1.26 | 9.52 | 510 |
| | | NFGRSFVKD | | | | | |
| B4H186 | GL22527 | KHAHSMITSMLTFVSSVM | 0.42 | 3 | 1.26 | 9.52 | 511 |
| | | NFGRSFVKD | | | | | |
| O77559 | ADM [Cleaved into: Adrenomedullin (AM); | RAHQVLANLLKM | 0.50 | 2.5 | 1.26 | 11 | 512 |
| | Proadrenomedullin N-20 terminal peptide | | | | | | |
| | (ProAM N-terminal 20 peptide) (PAMP) | | | | | | |
| | (ProAM-N20)] | | | | | | |
| O97944 | Alpha-S2-casein | QKFLNKIYQYYQTFL | 0.63 | 2 | 1.25 | 5.8 | 513 |
| Q8WT56 | Fatty-acid and retinol-binding protein 1 | EKFKRIANSFLQ | 0.63 | 2 | 1.25 | 8.81 | 514 |
| | (Ls-FAR-1) | | | | | | |
| Q25619 | Fatty-acid and retinol-binding protein 1 | EKFKRIANSFLQ | 0.63 | 2 | 1.25 | 8.62 | 515 |
| | (Antigen maltose-binding protein) (Ov- | | | | | | |
| | FAR-1)(Ov20) (OvMBP/11) (OvS1) (S1 protein) | | | | | | |
| O43555 | Progonadoliberin-2 (Progonadoliberin II) | RHLARTLLTAARE | 0.42 | 2.5 | 1.06 | 10.8 | 516 |
| | [Cleaved into: Gonadoliberin-2 | | | | | | |
| | (Gonadoliberin II) (Gonadotropin-releas- | | | | | | |
| | ing hormone II) (GnRH II) (Luliberin II) | | | | | | |
| | (Luteinizing hormone-releasing hormone | | | | | | |
| | II) (LH-RH II);GnRH-associated peptide 2 | | | | | | |
| | (GnRH-associated peptide II)] | | | | | | |
| K9M1U5 | Interferon lambda-4 (IFN-lambda-4) | CARLRHVARGIADAQAVL | 0.36 | 2.5 | 0.89 | 11.3 | 517 |
| | | SGL | | | | | |

[0155] When assessed against a panel of prototypic and important human pathogens, it was found that the study test peptides had potent activity against nearly all of the organisms considered (FIG. 8). In particular, of the interleukins, sequences derived from turkey IL-5 (tIL-5) were markedly potent against all organisms at pH's representative of physiologic (pH 7.5) and septic/wound (pH 5.5) environments. Sequences derived from human interleukins (hIL-7, hIL-13, hIL-21) were somewhat less potent at pH 7.5, though retained significant activity at the physiologically important pH 5.5. Likewise, the peptides derived from human and bat IFN-γ ad significant activity against most organisms, being somewhat more potent at pH 7.5 than 5.5. Of the study test peptides, perhaps some of the most impressive were derived from Phytophthora. While Pp-1 and Pp-4 had significant activity against many organisms, Pp-2 was particularly potent against bacteria and fungi, activities that were retained at pH 5.5.

[0156] This example has utilized an alternate computational approach to screen for conserved elements common to a singular class of AHAPs as a means towards discovering universal sequence and structural elements that may confer microbicidal activity. Here, this example first identified a consensus sequence that was common to a majority of known AHAPs. This consensus was then subjected to an iterative refinement, based on alignments with both sequence and structure databases, to generate a linear formula that described an amphipathic helical span that was representative of most known AHAPs. In particular, this sequence formula consisted of a 18 residue span that included the following polar [EDKRHQNTS(AG)] and non-polar [VMCILFWY(AG)] residues. When translated into a three dimensional radial array, this α-core formula describes an idealized amphipathic helix comprised of equivalent polar and non-polar facets (FIGS. 1A-B and 2).

[0157] One component of the iterative optimization of the α-core formula involved queries against a control AHAP dataset. These studies revealed that glycine and alanine were critical elements found within AHAP amphipathic domains, as preliminary versions of the formula lacking these residues were largely unsuccessful, retrieving fewer than 10% of control AHAP sequences. Given the inherent amphipathic frequency of the α-core formula, it was possible to assess the positional requirement for specific residues on either the polar or non-polar face of an amphipathic helix. Initial studies with glycine indicated that it was essential that this residue be included with both the polar and non-polar residue search terms, as omission from either group dramatically reduced the number of returned sequences from the control dataset. Likewise, similar studies with alanine, revealed that it was important to include this residue with both the polar and non-polar residue groups to efficiently retrieve most AHAPs from the control dataset. As the α-core formula is translated into a three dimensional helical array, these studies further indicated that alanine and glycine are likely to be found on either the polar or non-polar face of AHAP amphipathic helices.

[0158] Similar to the above sequence-based optimization studies, structure-based alignments with the PDB database were also carried out. These studies revealed that while the inclusion of proline in the formula dramatically reduced the number of retrieved helices, glycine and alanine were tolerated and were commonly found in helical spans. These studies further revealed that the α-core sequence formula retrieved helical spans with a high degree of fidelity, correctly identifying such domains more than 90% of the time. While the α-core formula was not designed as a secondary structure characterization tool, its efficiency in identifying helical spans compares favorably with such tools which correctly identify helices with frequencies ranging from xx to 81.5%.

### Database Searches

[0159] Once the α-core formula was refined, it was used as a query against the SwissProt database. These studies revealed that it retrieved nearly all classes of AHAPs (94%) and approximately 89% of all known individual AHAPs with a relatively high degree of specificity. Upon examination, those individual peptides or peptide families that were not retrieved by the formula were often found to have relatively short stretches of amphipathicity or interrupted helical domains, such as the “ranabox” peptides of amphibians which are characterized as having a C-terminal helix-turn-helix domain.

[0160] It is noteworthy that while the formula describes an idealized perfectly amphipathic helix, it successfully retrieved nearly all classes, and most individual AHAPs. This suggests that nearly all AHAPs have a span of near perfect amphipathicity for at least a 12 residue span representing the size of the domain queried in these studies. Given this observation, it supports the current hypothesis that amphipathicity is a critical component of microbicidal activity and is likely essential for the membrane permeabilizing properties of AHAPs.

### Residue Frequency within AHAP Helices

[0161] As the α-core sequence formula returns aligned datasets, it was possible to assess the relative frequency of various residues within AHAP α-helical spans. Moreover, these data allowed for some generalizations to be made regarding universal features common to AHAP helices. Overall, beyond the inherent amphipathicity found within AHAPs, these data revealed that several residues were strongly favored within amphipathic helices derived from various classes of organisms.

### Glycine

[0162] One notable finding from these studies was that glycine is highly represented in AHAP helices from arthropods and amphibians (30-35% of all residues), whereas it occurs less frequently in mammals (15% of all residues).

### Glycine in AHAP Helices of Arthropods and Amphibians

[0163] The presence of glycine within a majority of known AHAP helices would not initially be expected as this residue is known to destabilize α-helical structures. However, as was demonstrated by a large body of empirical evidence, many α-helical peptides are unstructured in aqueous environments, only to adopt an α-helical conformation in hydrophobic milieus. While the mechanism by which this occurs is not known, it is possible that peptides may become organized at the target as the relatively electronegative microbial surface may help to orient the cationic and other polar residues to one face of the amphipathic helical structure. In a similar fashion, the hydrophobic interior of the microbial plasma membrane may also help to organize the random coil structure by selectively interacting with hydrophobic residues within the peptide.

[0164] This lack of amphipathic organization prior to interaction with the target may be an important mechanism behind the selective toxicity of AHAPs that allows them to limit activity towards the host while still being able to adopt a microbicidal conformation as necessary when interacting with the target microbe.

### Glycine in AHAP Helices of Higher Eukaryotes

[0165] One caveat regarding the presence of glycine in AHAP helices is that while it is common in the short peptides found within lower organisms, it occurs less frequently in the longer AHAPs of higher eukaryotes as well as in proteins with mixed domain architectures such as the chemokines, granulysin and NK lysin. If the supposition that glycine is an important means to keep AHAPs in an unstructured and inactive state prior to interaction with their microbial target, the lack of glycine in these larger peptides suggests that they may use an alternate means of microbicidal dampening to limit toxicity towards the host.

### Cationic Residues in AHAP Helices of Arthropods and Amphibians

[0166] Beyond demonstrating an abundance of glycine in AHAP helices, residue frequency studies also revealed that lysine is highly favored over arginine in the amphipathic helices of the AHAPs considered in this study. Lysine was the most abundant cationic residue in study AHAP helices, where it was strongly preferred over arginine in non-mammalian peptides at a 12:1 ratio. In mammals, lysine was still preferred over arginine, but to a lesser extent with a 3:1 ratio. By comparison, lysine was less abundant in toxins where it was preferred over arginine at a 2:1 ratio.

[0167] It may be of some relevance that biophysical measures have demonstrated lysine is less efficient at generating membrane destabilizing NGC than arginine, as it can only interact with a single lipid head group at a time. Because of this, AHAPs that are rich in lysine often compensate for this lack of permeabilizing ability by having an increased mean hydrophobicity, in what has been termed the ‘saddle-splay curvature selection’ rule. In the current study, AHAP helices largely support this rule with the finding that, as the relative abundance of lysine is increased (N_{K}/N_{K}+N_{R}), mean peptide hydrophobicity is also increased.

### Biophysical Properties of AHAP Helices as Compared with Other α-Helical Domains

[0168] Beyond measurements of residue frequency, a number of additional properties of helices retrieved by the α-core formula were determined including: Q, μH, H. When averaged across families, these quantitative data revealed a number of insights regarding the biophysical properties of retrieved AHAP helices versus those of toxins and other groups.

[0169] One defining characteristic of AHAPs is that they are typically cationic in nature, a property that has been shown to enhance their selectivity towards the relatively electronegative surface of many microorganisms. The universality of this biophysical property is supported by findings from the current study, where amphipathic helices derived from AHAPs had an average net charge of +2.0 over a twelve residue span. Moreover, if only cationic AHAPs are considered (Q≥0.5 for 707 of 803 retrieved sequences), this value rises to +2.7. By comparison the average charge for toxin and other helices retrieved in these studies was +1.3 and +0.6 respectively, suggesting that cationicity may be selectively favored in AHAPs as compared with other amphipathic peptides.

[0170] Another characteristic feature of AHAPs is that they are frequently amphipathic in nature, a property that has been deemed essential for their membrane permeabilizing activities towards microbes. As the α-core formula searches for amphipathic sequences, all of the helices returned by these queries were a priori amphipathic in nature. However, it was still of interest to compare the relative amphipathicity, as quantitated by μH, of identified helices between various classes of peptides. Results from the current study support the theory that amphipathicity is an essential biophysical property of AHAPs as the average hydrophobic moment for study AHAP helices was 0.52, a relatively high value when compared to archetypal amphipathic helices such as cecropin A (μHₘₐₓ=0.61) or LL-37 (μHₘₐₓ=0.78). In comparison, the amphipathicity of helices derived from toxins and other proteins were somewhat lower at μH=0.42 and 0.39 respectively.

[0171] In addition, mean hydrophobicity (H) was somewhat greater for AHAPs (0.42) than for toxins (0.34) or other study peptides (0.39). This observation suggests that a moderate level of hydrophobicity may be essential for the membrane permeabilizing properties of AHAPs.

### Identify New Antimicrobial Sequences

[0172] The α-core sequence formula also retrieved a large number of uncharacterized sequences as well as proteins with an alternate primary function. Given the fidelity of retrieving antimicrobial sequences, it was of interest to determine whether some of these alternate sequences might also possess antimicrobial properties. As described, putative microbicidal sequences were scored for properties that were most discriminative at separating AHAPs from other sequences (μH*Q or μH*PI) and lead candidates of biological interest were synthesized for further study.

[0173] Representative peptide helices from three separate high-scoring groups, interleukins (tIL-5, hIL-7, hIL-13 and hIL-21), interferons (bIFN-γ, hIFN-γ) and uncharacterized sequences from P. parasitica were synthesized and tested for their microbicidal activity. Notably, all of these peptides displayed potent microbicidal activity, which in many cases was greater than that of classic AHAPs such as LL-37. These data strongly suggest that the amphipathic sequence formula can successfully identify amphipathic helices with antimicrobial properties.

[0174] Unless otherwise defined, all technical and scientific terms used herein have the same meaning as commonly understood by one of ordinary skill in the art to which this disclosure belongs.

[0175] The disclosures illustratively described herein may suitably be practiced in the absence of any element or elements, limitation or limitations, not specifically disclosed herein. Thus, for example, the terms “comprising”, “including,” “containing”, etc. shall be read expansively and without limitation. Additionally, the terms and expressions employed herein have been used as terms of description and not of limitation, and there is no intention in the use of such terms and expressions of excluding any equivalents of the features shown and described or portions thereof, but it is recognized that various modifications are possible within the scope of the disclosure claimed.

[0176] Thus, it should be understood that although the present disclosure has been specifically disclosed by preferred embodiments and optional features, modification, improvement and variation of the disclosures embodied therein herein disclosed may be resorted to by those skilled in the art, and that such modifications, improvements and variations are considered to be within the scope of this disclosure. The materials, methods, and examples provided here are representative of preferred embodiments, are exemplary, and are not intended as limitations on the scope of the disclosure.

[0177] The disclosure has been described broadly and generically herein. Each of the narrower species and subgeneric groupings falling within the generic disclosure also form part of the disclosure. This includes the generic description of the disclosure with a proviso or negative limitation removing any subject matter from the genus, regardless of whether or not the excised material is specifically recited herein.

[0178] In addition, where features or aspects of the disclosure are described in terms of Markush groups, those skilled in the art will recognize that the disclosure is also thereby described in terms of any individual member or subgroup of members of the Markush group.

[0179] All publications, patent applications, patents, and other references mentioned herein are expressly incorporated by reference in their entirety, to the same extent as if each were incorporated by reference individually. In case of conflict, the present specification, including definitions, will control.

[0180] It is to be understood that while the disclosure has been described in conjunction with the above embodiments, that the foregoing description and examples are intended to illustrate and not limit the scope of the disclosure. Other aspects, advantages and modifications within the scope of the disclosure will be apparent to those skilled in the art to which the disclosure pertains.

The application's sequence listing, which the Patent Office published only in electronic form, follows.

SEQUENCE LISTING (6860 sequences)

SEQ ID NO: 1 - protein, 19 aa, Artificial Sequence
  Synthetic
KRFIEKLRTFLRKLSRGAK

SEQ ID NO: 2 - protein, 25 aa, Artificial Sequence
  Synthetic
LCFLKRLLQEIKTCWNKILMGTKEH

SEQ ID NO: 3 - protein, 23 aa, Artificial Sequence
  Synthetic
EVAQFVKDLLLHLKKLFREGRFN

SEQ ID NO: 4 - protein, 29 aa, Artificial Sequence
  Synthetic
KEFLERFKSLLQKMIHQHLSSRTHGSEDS

SEQ ID NO: 5 - protein, 35 aa, Artificial Sequence
  Synthetic
KAISELYNVITELSKSNSKMRKRRQNLFRGWKASK

SEQ ID NO: 6 - protein, 35 aa, Artificial Sequence
  Synthetic
AIHELIQVMAELSPAAKTGKRKRSQMLFRGRRASQ

SEQ ID NO: 7 - protein, 20 aa, Artificial Sequence
  Synthetic
TQAWTNFKKWFKKWFKKTFS

SEQ ID NO: 8 - protein, 27 aa, Artificial Sequence
  Synthetic
LFQKIKRWWKRIFEHEASRSARRLRAV

SEQ ID NO: 9 - protein, 20 aa, Artificial Sequence
  Synthetic
KEVIKKFTKAMEKMKKNGRA

SEQ ID NO: 10 - protein, 27 aa, Artificial Sequence
  Synthetic
LWQRFLRWWNRLFHVSSNRLLREGGKK

SEQ ID NO: 11 - protein, 17 aa, Artificial Sequence
  Synthetic
YGGFLRRIRPKLKWDNQ

SEQ ID NO: 12 - protein, 29 aa, Artificial Sequence
  Synthetic
KEFLERFKSLLQKMIHQHLSSRTHGSEDS

SEQ ID NO: 13 - protein, 32 aa, Artificial Sequence
  Synthetic
YGGFLRRIRPKLKWDNQKRYGGFLRRQFKVVT

SEQ ID NO: 14 - protein, 60 aa, Artificial Sequence
  Synthetic
RFLHGYHRFMHSVGRVFSKWGESPNRSRRHSPHQALRKGVRRTRPSRKGKRLMTRGQLPR

SEQ ID NO: 15 - protein, 21 aa, Artificial Sequence
  Synthetic
CPTAQLIATLKNGRKICLDLQ

SEQ ID NO: 16 - protein, 22 aa, Artificial Sequence
  Synthetic
CPTAQLIATLKNGRKICLDLQP

SEQ ID NO: 17 - protein, 23 aa, Artificial Sequence
  Synthetic
CPTAQLIATLKNGRKICLDLQAP

SEQ ID NO: 18 - protein, 22 aa, Artificial Sequence
  Synthetic
CPTAQLIATLKNGRKICLDLQA

SEQ ID NO: 19 - protein, 14 aa, Artificial Sequence
  Synthetic
RIKKFLKRCCKKIK

SEQ ID NO: 20 - protein, 14 aa, Artificial Sequence
  Synthetic
RIKKFLKRCCKKIK

SEQ ID NO: 21 - protein, 14 aa, Artificial Sequence
  Synthetic
RIKKFLKRCCKKIK

SEQ ID NO: 22 - protein, 22 aa, Artificial Sequence
  Synthetic
FLKKLLQKIKTCWNKILRGIKE

SEQ ID NO: 23 - protein, 16 aa, Artificial Sequence
  Synthetic
KRVKRFCKKACRKASQ

SEQ ID NO: 24 - protein, 16 aa, Artificial Sequence
  Synthetic
KRVKRFCKKACRKASQ

SEQ ID NO: 25 - protein, 18 aa, Artificial Sequence
  Synthetic
KNVKRFIEKLRTFLRKLS

SEQ ID NO: 26 - protein, 12 aa, Artificial Sequence
  Synthetic
LVRKIIKYCRKL

SEQ ID NO: 27 - protein, 12 aa, Artificial Sequence
  Synthetic
LVRKIIKYCRKL

SEQ ID NO: 28 - protein, 14 aa, Artificial Sequence
  Synthetic
FRRLCRNIKEVIKK

SEQ ID NO: 29 - protein, 17 aa, Artificial Sequence
  Synthetic
TQAWTNFKKWFKKWFKK

SEQ ID NO: 30 - protein, 17 aa, Artificial Sequence
  Synthetic
TQAWTNFKKWFKKWFKK

SEQ ID NO: 31 - protein, 17 aa, Artificial Sequence
  Synthetic
TQAWTNFKKWFKKWFKK

SEQ ID NO: 32 - protein, 17 aa, Artificial Sequence
  Synthetic
TQAWTNFKKWFKKWFKK

SEQ ID NO: 33 - protein, 15 aa, Artificial Sequence
  Synthetic
VKKFIEKLRTFIRKL

SEQ ID NO: 34 - protein, 15 aa, Artificial Sequence
  Synthetic
VKKFIEKLRTFIRKL

SEQ ID NO: 35 - protein, 15 aa, Artificial Sequence
  Synthetic
VKKFIEKLRTFIRKL

SEQ ID NO: 36 - protein, 16 aa, Artificial Sequence
  Synthetic
KEFLKSFAKLIRKVIR

SEQ ID NO: 37 - protein, 16 aa, Artificial Sequence
  Synthetic
KEFLKSFAKLIKKVIR

SEQ ID NO: 38 - protein, 16 aa, Artificial Sequence
  Synthetic
KEFLKSFAKLIKKVIR

SEQ ID NO: 39 - protein, 16 aa, Artificial Sequence
  Synthetic
KEFLKSFAKLIKKVIR

SEQ ID NO: 40 - protein, 16 aa, Artificial Sequence
  Synthetic
KEFLKSFAKLIKKVIR

SEQ ID NO: 41 - protein, 16 aa, Artificial Sequence
  Synthetic
KEFLKSLAKLIKKVIR

SEQ ID NO: 42 - protein, 16 aa, Artificial Sequence
  Synthetic
FFKWISKFIRRLSKCG

SEQ ID NO: 43 - protein, 15 aa, Artificial Sequence
  Synthetic
ANKANRMMRKIMRKL

SEQ ID NO: 44 - protein, 27 aa, Artificial Sequence
  Synthetic
WYQLIRTFGNLIHQKYRKLLEAYRKLR

SEQ ID NO: 45 - protein, 19 aa, Artificial Sequence
  Synthetic
FLKRLLREIKTCWNKILKG

SEQ ID NO: 46 - protein, 19 aa, Artificial Sequence
  Synthetic
FLKRLLREIKTCWNKILKG

SEQ ID NO: 47 - protein, 19 aa, Artificial Sequence
  Synthetic
FLKRLLREIKTCWNKILKG

SEQ ID NO: 48 - protein, 18 aa, Artificial Sequence
  Synthetic
IIKVITRALRGARRLLKY

SEQ ID NO: 49 - protein, 17 aa, Artificial Sequence
  Synthetic
FLKRLLQKIKTCWNKIL

SEQ ID NO: 50 - protein, 17 aa, Artificial Sequence
  Synthetic
FLKRLLQKIKTCWNKIL

SEQ ID NO: 51 - protein, 17 aa, Artificial Sequence
  Synthetic
FLKRLLQKIKTCWNKIL

SEQ ID NO: 52 - protein, 17 aa, Artificial Sequence
  Synthetic
FLKRLLQKIKTCWNKIL

SEQ ID NO: 53 - protein, 17 aa, Artificial Sequence
  Synthetic
FLKRLLQKIKTCWNKIL

SEQ ID NO: 54 - protein, 17 aa, Artificial Sequence
  Synthetic
FLKRLLQKIKTCWNKIL

SEQ ID NO: 55 - protein, 17 aa, Artificial Sequence
  Synthetic
FLKRLLQKIKTCWNKIL

SEQ ID NO: 56 - protein, 17 aa, Artificial Sequence
  Synthetic
FLKRLLQKIKTCWNKIL

SEQ ID NO: 57 - protein, 17 aa, Artificial Sequence
  Synthetic
NGLFQKIKRWWKRIFDR

SEQ ID NO: 58 - protein, 14 aa, Artificial Sequence
  Synthetic
RRCLQLAHKVIRKL

SEQ ID NO: 59 - protein, 15 aa, Artificial Sequence
  Synthetic
FIKKLMTFIRKVLKT

SEQ ID NO: 60 - protein, 22 aa, Artificial Sequence
  Synthetic
FVKRLLDEIKTCWNKILRGAKK

SEQ ID NO: 61 - protein, 22 aa, Artificial Sequence
  Synthetic
FVKRLLDEIKTCWNKILRGAKK

SEQ ID NO: 62 - protein, 22 aa, Artificial Sequence
  Synthetic
FVKRLLDEIKTCWNKILRGAKK

SEQ ID NO: 63 - protein, 22 aa, Artificial Sequence
  Synthetic
FVKRLLDEIKTCWNKILRGAKK

SEQ ID NO: 64 - protein, 22 aa, Artificial Sequence
  Synthetic
FVKRLLDEIKTCWNKILRGAKK

SEQ ID NO: 65 - protein, 22 aa, Artificial Sequence
  Synthetic
FVKRLLDEIKTCWNKILRGAKK

SEQ ID NO: 66 - protein, 19 aa, Artificial Sequence
  Synthetic
FLKTLLQKIKTCWNKILRG

SEQ ID NO: 67 - protein, 14 aa, Artificial Sequence
  Synthetic
ITKAAKCAKKIYKR

SEQ ID NO: 68 - protein, 17 aa, Artificial Sequence
  Synthetic
TQAWTNFKKWFKNWFKK

SEQ ID NO: 69 - protein, 16 aa, Artificial Sequence
  Synthetic
KEVIKKFTKAMEKMKK

SEQ ID NO: 70 - protein, 16 aa, Artificial Sequence
  Synthetic
KEVIKKFTKAMEKMKK

SEQ ID NO: 71 - protein, 16 aa, Artificial Sequence
  Synthetic
KEVIKKFTKAMEKMKK

SEQ ID NO: 72 - protein, 16 aa, Artificial Sequence
  Synthetic
KEVIKKFTKAMEKMKK

SEQ ID NO: 73 - protein, 16 aa, Artificial Sequence
  Synthetic
KEVIKKFTKAMEKMKK

SEQ ID NO: 74 - protein, 16 aa, Artificial Sequence
  Synthetic
KEVIKKFTKAMEKMKK

SEQ ID NO: 75 - protein, 16 aa, Artificial Sequence
  Synthetic
KEVIKKFTKAMEKMKK

SEQ ID NO: 76 - protein, 17 aa, Artificial Sequence
  Synthetic
NGLFQKIKRWWKRIFEH

SEQ ID NO: 77 - protein, 17 aa, Artificial Sequence
  Synthetic
NGLFQKIKRWWKRIFEH

SEQ ID NO: 78 - protein, 17 aa, Artificial Sequence
  Synthetic
NGLFQKIKRWWKRIFEH

SEQ ID NO: 79 - protein, 17 aa, Artificial Sequence
  Synthetic
NGLFQKIKRWWKRIFEH

SEQ ID NO: 80 - protein, 17 aa, Artificial Sequence
  Synthetic
NGLFQKIKRWWKRIFEH

SEQ ID NO: 81 - protein, 14 aa, Artificial Sequence
  Synthetic
ITKASKCAKKIYKR

SEQ ID NO: 82 - protein, 15 aa, Artificial Sequence
  Synthetic
LWDKFQKFLKKVIRI

SEQ ID NO: 83 - protein, 19 aa, Artificial Sequence
  Synthetic
CNHMPNLLTRCLQRLKRLK

SEQ ID NO: 84 - protein, 16 aa, Artificial Sequence
  Synthetic
HSFYKCIDNLCKRFRR

SEQ ID NO: 85 - protein, 15 aa, Artificial Sequence
  Synthetic
MRRCLQLIDKVIRKL

SEQ ID NO: 86 - protein, 15 aa, Artificial Sequence
  Synthetic
MRRCLQLIDKVIRKL

SEQ ID NO: 87 - protein, 15 aa, Artificial Sequence
  Synthetic
MRRCLQLIDKVIRKL

SEQ ID NO: 88 - protein, 15 aa, Artificial Sequence
  Synthetic
MRRCLQLIDKVIRKL

SEQ ID NO: 89 - protein, 15 aa, Artificial Sequence
  Synthetic
MRRCLQLIDKVIRKL

SEQ ID NO: 90 - protein, 15 aa, Artificial Sequence
  Synthetic
MRRCLQLIDKVIRKL

SEQ ID NO: 91 - protein, 15 aa, Artificial Sequence
  Synthetic
MRRCLQLIDKVIRKL

SEQ ID NO: 92 - protein, 15 aa, Artificial Sequence
  Synthetic
MRRCLQLIDKVIRKL

SEQ ID NO: 93 - protein, 15 aa, Artificial Sequence
  Synthetic
MRRCLQLIDKVIRKL

SEQ ID NO: 94 - protein, 15 aa, Artificial Sequence
  Synthetic
MRRCLQLIDKVIRKL

SEQ ID NO: 95 - protein, 15 aa, Artificial Sequence
  Synthetic
MRRCLQFIDKVIRKL

SEQ ID NO: 96 - protein, 15 aa, Artificial Sequence
  Synthetic
MRKCLQLIDKVIRKL

SEQ ID NO: 97 - protein, 15 aa, Artificial Sequence
  Synthetic
MRRCLQLIEKVIRKL

SEQ ID NO: 98 - protein, 16 aa, Artificial Sequence
  Synthetic
KEFLKSFEKLIKKVIR

SEQ ID NO: 99 - protein, 18 aa, Artificial Sequence
  Synthetic
NLCKRACRTCCTHCRRVP

SEQ ID NO: 100 - protein, 14 aa, Artificial Sequence
  Synthetic
RRCLQLIDKVIRKL

SEQ ID NO: 101 - protein, 16 aa, Artificial Sequence
  Synthetic
YARRFSTLFRHLIKMI

SEQ ID NO: 102 - protein, 15 aa, Artificial Sequence
  Synthetic
REFLKSFAKLIKKVI

SEQ ID NO: 103 - protein, 15 aa, Artificial Sequence
  Synthetic
MRRCLQLIDKVMRKL

SEQ ID NO: 104 - protein, 15 aa, Artificial Sequence
  Synthetic
MRRCLQLIDKVVRKL

SEQ ID NO: 105 - protein, 15 aa, Artificial Sequence
  Synthetic
MRRCLQLIDKAIRKI

SEQ ID NO: 106 - protein, 15 aa, Artificial Sequence
  Synthetic
MRRCLQLIDKAIRKL

SEQ ID NO: 107 - protein, 15 aa, Artificial Sequence
  Synthetic
MRRCLQLIDKAIKKL

SEQ ID NO: 108 - protein, 15 aa, Artificial Sequence
  Synthetic
MRRCLQLVDKVIRKL

SEQ ID NO: 109 - protein, 15 aa, Artificial Sequence
  Synthetic
MRRCLQFVDKVIKRL

SEQ ID NO: 110 - protein, 15 aa, Artificial Sequence
  Synthetic
MRKCLQLVDKVIRKL

SEQ ID NO: 111 - protein, 14 aa, Artificial Sequence
  Synthetic
VKKAVKYLRTIMKS

SEQ ID NO: 112 - protein, 16 aa, Artificial Sequence
  Synthetic
KEFLKSFAKLIKQVIR

SEQ ID NO: 113 - protein, 16 aa, Artificial Sequence
  Synthetic
KEFLKSFAKLIKQVIR

SEQ ID NO: 114 - protein, 16 aa, Artificial Sequence
  Synthetic
KEFLKSFAKLIKQVIR

SEQ ID NO: 115 - protein, 16 aa, Artificial Sequence
  Synthetic
KEFLKSFAKLIKQVIR

SEQ ID NO: 116 - protein, 14 aa, Artificial Sequence
  Synthetic
LSHLLARIWKPYKK

SEQ ID NO: 117 - protein, 19 aa, Artificial Sequence
  Synthetic
LSIFAKCFHDLIKKFKKLG

SEQ ID NO: 118 - protein, 15 aa, Artificial Sequence
  Synthetic
MRRCLQLIDKVARKL

SEQ ID NO: 119 - protein, 18 aa, Artificial Sequence
  Synthetic
LLQKIKTCWNKILRGIKE

SEQ ID NO: 120 - protein, 18 aa, Artificial Sequence
  Synthetic
LLQKIKTCWNKILRGIKE

SEQ ID NO: 121 - protein, 18 aa, Artificial Sequence
  Synthetic
LLQKIKTCWNKILRGIKE

SEQ ID NO: 122 - protein, 14 aa, Artificial Sequence
  Synthetic
FRKLFRVYSNFLRG

SEQ ID NO: 123 - protein, 19 aa, Artificial Sequence
  Synthetic
FLKRLLREIKTCWNKILNS

SEQ ID NO: 124 - protein, 16 aa, Artificial Sequence
  Synthetic
IRRCLQLIDKAVRKLY

SEQ ID NO: 125 - protein, 15 aa, Artificial Sequence
  Synthetic
NFLSLIKKIFSVWKR

SEQ ID NO: 126 - protein, 14 aa, Artificial Sequence
  Synthetic
KIMRKIMTNLSRLC

SEQ ID NO: 127 - protein, 17 aa, Artificial Sequence
  Synthetic
KEFLKSFAKLIQKVIKS

SEQ ID NO: 128 - protein, 15 aa, Artificial Sequence
  Synthetic
FIKKLMTFIQKVLKN

SEQ ID NO: 129 - protein, 14 aa, Artificial Sequence
  Synthetic
RDAGRLLRSLKKLK

SEQ ID NO: 130 - protein, 17 aa, Artificial Sequence
  Synthetic
KNATTFIKKLMTFIRKA

SEQ ID NO: 131 - protein, 16 aa, Artificial Sequence
  Synthetic
GEMKNAMKKLWTRVRK

SEQ ID NO: 132 - protein, 17 aa, Artificial Sequence
  Synthetic
TQAWTNFKKWFKKWFKE

SEQ ID NO: 133 - protein, 17 aa, Artificial Sequence
  Synthetic
TQAWTNFKKWFKKWFKE

SEQ ID NO: 134 - protein, 19 aa, Artificial Sequence
  Synthetic
EVAQFVKDLLRHLKRLYRH

SEQ ID NO: 135 - protein, 14 aa, Artificial Sequence
  Synthetic
GAGRKVCAKLVKRL

SEQ ID NO: 136 - protein, 16 aa, Artificial Sequence
  Synthetic
LLQKIKTCWNKILRGS

SEQ ID NO: 137 - protein, 16 aa, Artificial Sequence
  Synthetic
LLQKIKTCWNKILRGS

SEQ ID NO: 138 - protein, 16 aa, Artificial Sequence
  Synthetic
LLQKIKTCWNKILRGS

SEQ ID NO: 139 - protein, 15 aa, Artificial Sequence
  Synthetic
NFIKRINDFLKKAKS

SEQ ID NO: 140 - protein, 23 aa, Artificial Sequence
  Synthetic
RFLHGYHRFMHSVGRVFSKWGES

SEQ ID NO: 141 - protein, 19 aa, Artificial Sequence
  Synthetic
LLQKIKTCWNKILRGAKEY

SEQ ID NO: 142 - protein, 19 aa, Artificial Sequence
  Synthetic
LLQKIKTCWNKILRGAKEY

SEQ ID NO: 143 - protein, 19 aa, Artificial Sequence
  Synthetic
LLQKIKTCWNKILRGAKEY

SEQ ID NO: 144 - protein, 19 aa, Artificial Sequence
  Synthetic
LLQKIKTCWNKILRGAKEY

SEQ ID NO: 145 - protein, 15 aa, Artificial Sequence
  Synthetic
FINKLMTFIRKALKP

SEQ ID NO: 146 - protein, 12 aa, Artificial Sequence
  Synthetic
LKDFLKSLKRIM

SEQ ID NO: 147 - protein, 13 aa, Artificial Sequence
  Synthetic
GRGIRPVGRFGRR

SEQ ID NO: 148 - protein, 16 aa, Artificial Sequence
  Synthetic
NGLWQRFLRWWNRLFH

SEQ ID NO: 149 - protein, 16 aa, Artificial Sequence
  Synthetic
NGLWQRFLRWWNRLFH

SEQ ID NO: 150 - protein, 16 aa, Artificial Sequence
  Synthetic
NGLWQRFLRWWNRLFH

SEQ ID NO: 151 - protein, 12 aa, Artificial Sequence
  Synthetic
SADKFWRRFARR

SEQ ID NO: 152 - protein, 16 aa, Artificial Sequence
  Synthetic
WSRWWSSCWRLWTRIY

SEQ ID NO: 153 - protein, 15 aa, Artificial Sequence
  Synthetic
YLKEALSRFKSWLKR

SEQ ID NO: 154 - protein, 14 aa, Artificial Sequence
  Synthetic
SPGRKLYNQIRRWP

SEQ ID NO: 155 - protein, 20 aa, Artificial Sequence
  Synthetic
KYGKSCEKAVHDLWHIIKKF

SEQ ID NO: 156 - protein, 14 aa, Artificial Sequence
  Synthetic
KVYSSVRKICKSCG

SEQ ID NO: 157 - protein, 15 aa, Artificial Sequence
  Synthetic
TQAWTNFKKWFKKMV

SEQ ID NO: 158 - protein, 14 aa, Artificial Sequence
  Synthetic
KIGASVRKICEKCR

SEQ ID NO: 159 - protein, 20 aa, Artificial Sequence
  Synthetic
GGGRDVLTRFKSWFKRVFGK

SEQ ID NO: 160 - protein, 14 aa, Artificial Sequence
  Synthetic
ITKASTCAKKIFKR

SEQ ID NO: 161 - protein, 17 aa, Artificial Sequence
  Synthetic
FIEKLMTFIRKALKNAR

SEQ ID NO: 162 - protein, 14 aa, Artificial Sequence
  Synthetic
AYYKRCARLLTRLA

SEQ ID NO: 163 - protein, 14 aa, Artificial Sequence
  Synthetic
AYYKRCARLLTRLA

SEQ ID NO: 164 - protein, 15 aa, Artificial Sequence
  Synthetic
SQLRNLIRSVRTVMR

SEQ ID NO: 165 - protein, 17 aa, Artificial Sequence
  Synthetic
KNATKFIEKLMTFIRRA

SEQ ID NO: 166 - protein, 15 aa, Artificial Sequence
  Synthetic
YASRGIRPVGRFGRR

SEQ ID NO: 167 - protein, 15 aa, Artificial Sequence
  Synthetic
HLKRYYGRILHYLKA

SEQ ID NO: 168 - protein, 17 aa, Artificial Sequence
  Synthetic
TIPAYYKRCARLLTRLA

SEQ ID NO: 169 - protein, 17 aa, Artificial Sequence
  Synthetic
TIPAYYKRCARLLTRLA

SEQ ID NO: 170 - protein, 17 aa, Artificial Sequence
  Synthetic
TIPAYYKRCARLLTRLA

SEQ ID NO: 171 - protein, 12 aa, Artificial Sequence
  Synthetic
VGRVHRLLRKGN

SEQ ID NO: 172 - protein, 14 aa, Artificial Sequence
  Synthetic
KVAASVRKICEKCR

SEQ ID NO: 173 - protein, 18 aa, Artificial Sequence
  Synthetic
IRKIAQLLNKVADAAKKG

SEQ ID NO: 174 - protein, 15 aa, Artificial Sequence
  Synthetic
GGFCKRFAGGAKKCH

SEQ ID NO: 175 - protein, 13 aa, Artificial Sequence
  Synthetic
MRFMRRLVRNLQY

SEQ ID NO: 176 - protein, 12 aa, Artificial Sequence
  Synthetic
LPGFIGKICRKI

SEQ ID NO: 177 - protein, 14 aa, Artificial Sequence
  Synthetic
ILANIHKIIKAYQR

SEQ ID NO: 178 - protein, 12 aa, Artificial Sequence
  Synthetic
IFHGCKKVARVL

SEQ ID NO: 179 - protein, 23 aa, Artificial Sequence
  Synthetic
LAKRYGGFMKRYGGFMKKMDELY

SEQ ID NO: 180 - protein, 15 aa, Artificial Sequence
  Synthetic
QAIRCMQSLFRTVKR

SEQ ID NO: 181 - protein, 14 aa, Artificial Sequence
  Synthetic
WRRALRAAAGPLAR

SEQ ID NO: 182 - protein, 14 aa, Artificial Sequence
  Synthetic
IKRIIRDVKEIVRA

SEQ ID NO: 183 - protein, 16 aa, Artificial Sequence
  Synthetic
KEFLKSFEKLIQKVIR

SEQ ID NO: 184 - protein, 16 aa, Artificial Sequence
  Synthetic
EKVSNWWKRIWEKIKN

SEQ ID NO: 185 - protein, 16 aa, Artificial Sequence
  Synthetic
EKVSNWWKRIWEKIKN

SEQ ID NO: 186 - protein, 23 aa, Artificial Sequence
  Synthetic
IPSCVTRALSRAARSIWDALKKI

SEQ ID NO: 187 - protein, 14 aa, Artificial Sequence
  Synthetic
ARKLYTIMNSFCRR

SEQ ID NO: 188 - protein, 29 aa, Artificial Sequence
  Synthetic
GKLMELGHKIMKNLENTVKEIIKYLKSLF

SEQ ID NO: 189 - protein, 20 aa, Artificial Sequence
  Synthetic
KPIKEFLERLKSLIQKMIHQ

SEQ ID NO: 190 - protein, 20 aa, Artificial Sequence
  Synthetic
KPIKEFLERLKSLIQKMIHQ

SEQ ID NO: 191 - protein, 20 aa, Artificial Sequence
  Synthetic
KPIKEFLERLKSLIQKMIHQ

SEQ ID NO: 192 - protein, 15 aa, Artificial Sequence
  Synthetic
KEFLKSFAKLIQKVI

SEQ ID NO: 193 - protein, 15 aa, Artificial Sequence
  Synthetic
KEFLKSFAKLIQKVI

SEQ ID NO: 194 - protein, 12 aa, Artificial Sequence
  Synthetic
RRLKGVAKKGLG

SEQ ID NO: 195 - protein, 17 aa, Artificial Sequence
  Synthetic
FLKRLLQEIKTCWNKIL

SEQ ID NO: 196 - protein, 17 aa, Artificial Sequence
  Synthetic
FLKRLLQEIKTCWNKIL

SEQ ID NO: 197 - protein, 17 aa, Artificial Sequence
  Synthetic
FLKRLLQEIKTCWNKIL

SEQ ID NO: 198 - protein, 17 aa, Artificial Sequence
  Synthetic
FLKRLLQEIKTCWNKIL

SEQ ID NO: 199 - protein, 17 aa, Artificial Sequence
  Synthetic
FLKRLLQEIKTCWNKIL

SEQ ID NO: 200 - protein, 17 aa, Artificial Sequence
  Synthetic
FLKRLLQEIKTCWNKIL

SEQ ID NO: 201 - protein, 17 aa, Artificial Sequence
  Synthetic
FLKRLLQEIKTCWNKIL

SEQ ID NO: 202 - protein, 20 aa, Artificial Sequence
  Synthetic
KPLKEFLERLKSLIQKMIHQ

SEQ ID NO: 203 - protein, 16 aa, Artificial Sequence
  Synthetic
KEFLKSFANLIKQVIR

SEQ ID NO: 204 - protein, 37 aa, Artificial Sequence
  Synthetic
GKLMELGHKIMRNLENTVKETIKYLKSLFSHASEVVK

SEQ ID NO: 205 - protein, 12 aa, Artificial Sequence
  Synthetic
HKMKKLLRYLNY

SEQ ID NO: 206 - protein, 17 aa, Artificial Sequence
  Synthetic
KSFSSICKELCKLCQRC

SEQ ID NO: 207 - protein, 17 aa, Artificial Sequence
  Synthetic
KSFSSICKELCKLCQRC

SEQ ID NO: 208 - protein, 16 aa, Artificial Sequence
  Synthetic
KEFLQSFGKLINKVIR

SEQ ID NO: 209 - protein, 21 aa, Artificial Sequence
  Synthetic
ILANFQRFLETAYRALRHLAR

SEQ ID NO: 210 - protein, 16 aa, Artificial Sequence
  Synthetic
KEFLKSFAKLIQQVIR

SEQ ID NO: 211 - protein, 16 aa, Artificial Sequence
  Synthetic
KEFLKSFAKLIQQVIR

SEQ ID NO: 212 - protein, 16 aa, Artificial Sequence
  Synthetic
KEFLKSFAKLIQQVIR

SEQ ID NO: 213 - protein, 16 aa, Artificial Sequence
  Synthetic
KEFLKSFAKLIQQVIR

SEQ ID NO: 214 - protein, 14 aa, Artificial Sequence
  Synthetic
KEFLQSFSKLMKKV

SEQ ID NO: 215 - protein, 18 aa, Artificial Sequence
  Synthetic
KPLHTMVNHISRFATKMT

SEQ ID NO: 216 - protein, 15 aa, Artificial Sequence
  Synthetic
GGKLFDVLKKIIKVI

SEQ ID NO: 217 - protein, 16 aa, Artificial Sequence
  Synthetic
KEFLQSFAKLIKQVIR

SEQ ID NO: 218 - protein, 18 aa, Artificial Sequence
  Synthetic
LLQKIKTCWNKILRGITE

SEQ ID NO: 219 - protein, 18 aa, Artificial Sequence
  Synthetic
RIRDVFSSIFRNIFNLFR

SEQ ID NO: 220 - protein, 18 aa, Artificial Sequence
  Synthetic
QKIAQLVKKWIKTVLEAR

SEQ ID NO: 221 - protein, 38 aa, Artificial Sequence
  Synthetic
GKLMELGHKIMRNLENTVKETIKYLKSLFSHAFEVVKT

SEQ ID NO: 222 - protein, 21 aa, Artificial Sequence
  Synthetic
EVTRLAKDLLQQLRKGVRQGK

SEQ ID NO: 223 - protein, 21 aa, Artificial Sequence
  Synthetic
EVTRLAKDLLQQLRKGVRQGK

SEQ ID NO: 224 - protein, 12 aa, Artificial Sequence
  Synthetic
LPRLLRTYISRI

SEQ ID NO: 225 - protein, 12 aa, Artificial Sequence
  Synthetic
LPRLLRTYISRI

SEQ ID NO: 226 - protein, 17 aa, Artificial Sequence
  Synthetic
LKKLNQIVQKFHQLLQG

SEQ ID NO: 227 - protein, 16 aa, Artificial Sequence
  Synthetic
DFKNLIRKCVDVARKV

SEQ ID NO: 228 - protein, 19 aa, Artificial Sequence
  Synthetic
NATTYLKEALSRFKSWLKR

SEQ ID NO: 229 - protein, 19 aa, Artificial Sequence
  Synthetic
NATTYLKEALSRFKSWLKR

SEQ ID NO: 230 - protein, 19 aa, Artificial Sequence
  Synthetic
NATTYLKEALSRFKSWLKR

SEQ ID NO: 231 - protein, 16 aa, Artificial Sequence
  Synthetic
KWVQKVVQAFLKRAEK

SEQ ID NO: 232 - protein, 14 aa, Artificial Sequence
  Synthetic
ARKMVTRALRALQN

SEQ ID NO: 233 - protein, 17 aa, Artificial Sequence
  Synthetic
KEFLERFKSLLQKMIHR

SEQ ID NO: 234 - protein, 13 aa, Artificial Sequence
  Synthetic
AKKALAKAKTVLK

SEQ ID NO: 235 - protein, 17 aa, Artificial Sequence
  Synthetic
NGLWQRFLRWWNRLFTG

SEQ ID NO: 236 - protein, 17 aa, Artificial Sequence
  Synthetic
NGLWQRFLRWWNRLFTG

SEQ ID NO: 237 - protein, 17 aa, Artificial Sequence
  Synthetic
NGLWQRFLRWWNRLFTG

SEQ ID NO: 238 - protein, 21 aa, Artificial Sequence
  Synthetic
ATKLSDAMQRIKTMFRNWYQK

SEQ ID NO: 239 - protein, 13 aa, Artificial Sequence
  Synthetic
CITFCNKCCRKCL

SEQ ID NO: 240 - protein, 19 aa, Artificial Sequence
  Synthetic
CCDLIRKCWHDIKECWKRC

SEQ ID NO: 241 - protein, 12 aa, Artificial Sequence
  Synthetic
KLFRIYSNFLRG

SEQ ID NO: 242 - protein, 12 aa, Artificial Sequence
  Synthetic
KLFRIYSNFLRG

SEQ ID NO: 243 - protein, 12 aa, Artificial Sequence
  Synthetic
KLFRIYSNFLRG

SEQ ID NO: 244 - protein, 12 aa, Artificial Sequence
  Synthetic
KLFRIYSNFLRG

SEQ ID NO: 245 - protein, 12 aa, Artificial Sequence
  Synthetic
KLFRIYSNFLRG

SEQ ID NO: 246 - protein, 12 aa, Artificial Sequence
  Synthetic
KLFRIYSNFLRG

SEQ ID NO: 247 - protein, 12 aa, Artificial Sequence
  Synthetic
KLFRIYSNFLRG

SEQ ID NO: 248 - protein, 16 aa, Artificial Sequence
  Synthetic
EKFESCMKKCSKICNK

SEQ ID NO: 249 - protein, 12 aa, Artificial Sequence
  Synthetic
KLFRVYSNFLRG

SEQ ID NO: 250 - protein, 12 aa, Artificial Sequence
  Synthetic
KLFRVYSNFLRG

SEQ ID NO: 251 - protein, 12 aa, Artificial Sequence
  Synthetic
KLFRVYSNFLRG

SEQ ID NO: 252 - protein, 12 aa, Artificial Sequence
  Synthetic
KLFRVYSNFLRG

SEQ ID NO: 253 - protein, 15 aa, Artificial Sequence
  Synthetic
RKLYHRVGTCIQNIF

SEQ ID NO: 254 - protein, 12 aa, Artificial Sequence
  Synthetic
FKSLKGYWSKFT

SEQ ID NO: 255 - protein, 17 aa, Artificial Sequence
  Synthetic
ISSLRSCWNKFEKIISR

SEQ ID NO: 256 - protein, 21 aa, Artificial Sequence
  Synthetic
VNHYHRGCEKITRCARDAARY

SEQ ID NO: 257 - protein, 17 aa, Artificial Sequence
  Synthetic
ISSLRSCWNKFEKLISR

SEQ ID NO: 258 - protein, 20 aa, Artificial Sequence
  Synthetic
CCRKVVKYWTHCCQEGLRCT

SEQ ID NO: 259 - protein, 17 aa, Artificial Sequence
  Synthetic
GRTFRSCARTAFRTAKL

SEQ ID NO: 260 - protein, 12 aa, Artificial Sequence
  Synthetic
KLFRVYANFLRG

SEQ ID NO: 261 - protein, 12 aa, Artificial Sequence
  Synthetic
YGRGCRRCCSYL

SEQ ID NO: 262 - protein, 19 aa, Artificial Sequence
  Synthetic
FLKRLLQEIKTCWNKILSG

SEQ ID NO: 263 - protein, 19 aa, Artificial Sequence
  Synthetic
FLKRLLQEIKTCWNKILSG

SEQ ID NO: 264 - protein, 19 aa, Artificial Sequence
  Synthetic
FLKRLLQEIKTCWNKILSG

SEQ ID NO: 265 - protein, 14 aa, Artificial Sequence
  Synthetic
SVARHAARDLRRWM

SEQ ID NO: 266 - protein, 18 aa, Artificial Sequence
  Synthetic
LLQKIKTCWNKILRDAKE

SEQ ID NO: 267 - protein, 17 aa, Artificial Sequence
  Synthetic
WAKYHAAVRHYVNLITR

SEQ ID NO: 268 - protein, 17 aa, Artificial Sequence
  Synthetic
WAKYHAAVRHYVNLITR

SEQ ID NO: 269 - protein, 15 aa, Artificial Sequence
  Synthetic
EEVFKKFKKVAKSFG

SEQ ID NO: 270 - protein, 14 aa, Artificial Sequence
  Synthetic
FGRAGAKFIRFGRS

SEQ ID NO: 271 - protein, 15 aa, Artificial Sequence
  Synthetic
DLKTLFTTIWKFIKK

SEQ ID NO: 272 - protein, 13 aa, Artificial Sequence
  Synthetic
KKCCGGCPRLCEK

SEQ ID NO: 273 - protein, 18 aa, Artificial Sequence
  Synthetic
KQVANPYRRGCGTIERCR

SEQ ID NO: 274 - protein, 14 aa, Artificial Sequence
  Synthetic
SDAKKLMRDLKRML

SEQ ID NO: 275 - protein, 15 aa, Artificial Sequence
  Synthetic
NKGMNEFKKILRTLA

SEQ ID NO: 276 - protein, 13 aa, Artificial Sequence
  Synthetic
FTKIKDALKKISQ

SEQ ID NO: 277 - protein, 12 aa, Artificial Sequence
  Synthetic
VRKIYQTAKHLP

SEQ ID NO: 278 - protein, 15 aa, Artificial Sequence
  Synthetic
VHNYSRGCSRITRCR

SEQ ID NO: 279 - protein, 15 aa, Artificial Sequence
  Synthetic
KIKRIVQKILESAER

SEQ ID NO: 280 - protein, 13 aa, Artificial Sequence
  Synthetic
ARMATKLGRKVLN

SEQ ID NO: 281 - protein, 15 aa, Artificial Sequence
  Synthetic
KTLVNLWSKLAQRIF

SEQ ID NO: 282 - protein, 35 aa, Artificial Sequence
  Synthetic
QALAKAGKGMHGGVPGGKQFIENGSEFAQKLLKKF

SEQ ID NO: 283 - protein, 18 aa, Artificial Sequence
  Synthetic
NPYRRGCSAITHCYRYAR

SEQ ID NO: 284 - protein, 17 aa, Artificial Sequence
  Synthetic
RVKQVLNQLLKNMDHLK

SEQ ID NO: 285 - protein, 14 aa, Artificial Sequence
  Synthetic
VSSFLEHVKRCVRH

SEQ ID NO: 286 - protein, 17 aa, Artificial Sequence
  Synthetic
LRTVTELLKKVVDAAKK

SEQ ID NO: 287 - protein, 14 aa, Artificial Sequence
  Synthetic
AKALFNKLTEYLKK

SEQ ID NO: 288 - protein, 20 aa, Artificial Sequence
  Synthetic
EVAQFVKDLLRHLRKLFHQG

SEQ ID NO: 289 - protein, 20 aa, Artificial Sequence
  Synthetic
EVAQFVKDLLRHLRKLFHQG

SEQ ID NO: 290 - protein, 20 aa, Artificial Sequence
  Synthetic
EVAQFVKDLLRHLRKLFHQG

SEQ ID NO: 291 - protein, 16 aa, Artificial Sequence
  Synthetic
KNLLKMLSKAVDALKS

SEQ ID NO: 292 - protein, 14 aa, Artificial Sequence
  Synthetic
LRRYFHRIDNFLKE

SEQ ID NO: 293 - protein, 12 aa, Artificial Sequence
  Synthetic
SRCYRSLYKCVA

SEQ ID NO: 294 - protein, 22 aa, Artificial Sequence
  Synthetic
QWLTSCWSTLMRLIHQMAGRYR

SEQ ID NO: 295 - protein, 14 aa, Artificial Sequence
  Synthetic
ASVRKMCEKCRTIR

SEQ ID NO: 296 - protein, 13 aa, Artificial Sequence
  Synthetic
CLKNAARGIRGLN

SEQ ID NO: 297 - protein, 13 aa, Artificial Sequence
  Synthetic
CLKNAARGIKGLN

SEQ ID NO: 298 - protein, 15 aa, Artificial Sequence
  Synthetic
EVAQFIKDLLRHLKK

SEQ ID NO: 299 - protein, 13 aa, Artificial Sequence
  Synthetic
GGAIGKFMNVLRR

SEQ ID NO: 300 - protein, 15 aa, Artificial Sequence
  Synthetic
ANEYRRGCSKITRCK

SEQ ID NO: 301 - protein, 13 aa, Artificial Sequence
  Synthetic
RSFRNGVGSGVKK

SEQ ID NO: 302 - protein, 14 aa, Artificial Sequence
  Synthetic
TILRKARNLLNHGI

SEQ ID NO: 303 - protein, 18 aa, Artificial Sequence
  Synthetic
AVWKDFLKNIGKAAGKAV

SEQ ID NO: 304 - protein, 27 aa, Artificial Sequence
  Synthetic
KHAHSMITSMLSFVNSVVNFGRSFVRN

SEQ ID NO: 305 - protein, 14 aa, Artificial Sequence
  Synthetic
VKKMLKDVPKLATS

SEQ ID NO: 306 - protein, 12 aa, Artificial Sequence
  Synthetic
RACQQFLKRCHL

SEQ ID NO: 307 - protein, 12 aa, Artificial Sequence
  Synthetic
NVLRALRRLGSS

SEQ ID NO: 308 - protein, 20 aa, Artificial Sequence
  Synthetic
GKNWSEFVRSMLRAMSKVAA

SEQ ID NO: 309 - protein, 18 aa, Artificial Sequence
  Synthetic
ELITFMKNLLDHLRRIYR

SEQ ID NO: 310 - protein, 16 aa, Artificial Sequence
  Synthetic
ICKSFQSLVHRFGHVT

SEQ ID NO: 311 - protein, 12 aa, Artificial Sequence
  Synthetic
LKCCKSMCGKVC

SEQ ID NO: 312 - protein, 12 aa, Artificial Sequence
  Synthetic
KRMEYIAKKLDK

SEQ ID NO: 313 - protein, 17 aa, Artificial Sequence
  Synthetic
ASVVQQIFQRIIRVLRS

SEQ ID NO: 314 - protein, 13 aa, Artificial Sequence
  Synthetic
KRLRKMGGDLNSL

SEQ ID NO: 315 - protein, 18 aa, Artificial Sequence
  Synthetic
KSYVEKLTKALSTIRQCI

SEQ ID NO: 316 - protein, 12 aa, Artificial Sequence
  Synthetic
RLGRQLHNIVDK

SEQ ID NO: 317 - protein, 15 aa, Artificial Sequence
  Synthetic
SQLTNLIRSVRTVMR

SEQ ID NO: 318 - protein, 14 aa, Artificial Sequence
  Synthetic
LKDLGSRARAWLRS

SEQ ID NO: 319 - protein, 13 aa, Artificial Sequence
  Synthetic
RSFRNGVGTGMKK

SEQ ID NO: 320 - protein, 13 aa, Artificial Sequence
  Synthetic
RSFRNGVGTGMKK

SEQ ID NO: 321 - protein, 14 aa, Artificial Sequence
  Synthetic
YRRGCSVITHCYRQ

SEQ ID NO: 322 - protein, 13 aa, Artificial Sequence
  Synthetic
CLKGIARGIHNLN

SEQ ID NO: 323 - protein, 12 aa, Artificial Sequence
  Synthetic
RFGRNAWGPWSK

SEQ ID NO: 324 - protein, 15 aa, Artificial Sequence
  Synthetic
ANPYSRGCSKIARCR

SEQ ID NO: 325 - protein, 12 aa, Artificial Sequence
  Synthetic
ILHSFLKVLHHL

SEQ ID NO: 326 - protein, 15 aa, Artificial Sequence
  Synthetic
IKCAKKIARDAHGLT

SEQ ID NO: 327 - protein, 16 aa, Artificial Sequence
  Synthetic
VLKLWNSVLKHICNLS

SEQ ID NO: 328 - protein, 17 aa, Artificial Sequence
  Synthetic
LRQLRSFMQDVFRSLRC

SEQ ID NO: 329 - protein, 12 aa, Artificial Sequence
  Synthetic
GRHLLNELKKWP

SEQ ID NO: 330 - protein, 14 aa, Artificial Sequence
  Synthetic
NCLKGIARGIHNLN

SEQ ID NO: 331 - protein, 12 aa, Artificial Sequence
  Synthetic
WRRVMHCFSYCW

SEQ ID NO: 332 - protein, 13 aa, Artificial Sequence
  Synthetic
RSFRNGVGSGAKK

SEQ ID NO: 333 - protein, 21 aa, Artificial Sequence
  Synthetic
DLTRALHDLVKALKKAYRTLD

SEQ ID NO: 334 - protein, 12 aa, Artificial Sequence
  Synthetic
KRLRKMGGDLNS

SEQ ID NO: 335 - protein, 17 aa, Artificial Sequence
  Synthetic
KNATTFIEKLMTFIRKA

SEQ ID NO: 336 - protein, 15 aa, Artificial Sequence
  Synthetic
EVIQLVKNLLNHLRR

SEQ ID NO: 337 - protein, 18 aa, Artificial Sequence
  Synthetic
LKEFLERLKSLIQKMIHQ

SEQ ID NO: 338 - protein, 15 aa, Artificial Sequence
  Synthetic
VNEYSRGCSKIHRCR

SEQ ID NO: 339 - protein, 15 aa, Artificial Sequence
  Synthetic
VNEYSRGCSKIHRCR

SEQ ID NO: 340 - protein, 15 aa, Artificial Sequence
  Synthetic
VNEYSRGCSKIHRCR

SEQ ID NO: 341 - protein, 21 aa, Artificial Sequence
  Synthetic
CGQFTRLCRHFVHELKQALTS

SEQ ID NO: 342 - protein, 21 aa, Artificial Sequence
  Synthetic
CGQFTRLCRHFVHELKQALTS

SEQ ID NO: 343 - protein, 12 aa, Artificial Sequence
  Synthetic
DKAKKAIERIKQ

SEQ ID NO: 344 - protein, 16 aa, Artificial Sequence
  Synthetic
EKISDWWKRIWEKIKN

SEQ ID NO: 345 - protein, 22 aa, Artificial Sequence
  Synthetic
LENMKTVIKSGVEKLKNFLQRG

SEQ ID NO: 346 - protein, 16 aa, Artificial Sequence
  Synthetic
NATRFMEKLMTFVRKA

SEQ ID NO: 347 - protein, 14 aa, Artificial Sequence
  Synthetic
RMATKAGRRVINAR

SEQ ID NO: 348 - protein, 19 aa, Artificial Sequence
  Synthetic
ILANFQRFLETAYRALRHL

SEQ ID NO: 349 - protein, 12 aa, Artificial Sequence
  Synthetic
RFGRSAWGSWSK

SEQ ID NO: 350 - protein, 16 aa, Artificial Sequence
  Synthetic
THVKQAINKMLTKISS

SEQ ID NO: 351 - protein, 16 aa, Artificial Sequence
  Synthetic
RELPKVCRNIFSRVSL

SEQ ID NO: 352 - protein, 14 aa, Artificial Sequence
  Synthetic
ASVRKICSRCVALK

SEQ ID NO: 353 - protein, 14 aa, Artificial Sequence
  Synthetic
LSRYAKLANRLANP

SEQ ID NO: 354 - protein, 42 aa, Artificial Sequence
  Synthetic
DILRECAKGLEVRVAENQHLANETVEYFFKKLWRGVKKVVKK

SEQ ID NO: 355 - protein, 25 aa, Artificial Sequence
  Synthetic
YGCCRKGYNGCKRCCSYAGEAIDKV

SEQ ID NO: 356 - protein, 25 aa, Artificial Sequence
  Synthetic
YGCCRKGYNGCKRCCSYAGEAIDKV

SEQ ID NO: 357 - protein, 18 aa, Artificial Sequence
  Synthetic
QEFLNSFSKLMQKVIKIH

SEQ ID NO: 358 - protein, 12 aa, Artificial Sequence
  Synthetic
RCLSPMNHLCHK

SEQ ID NO: 359 - protein, 12 aa, Artificial Sequence
  Synthetic
RCLSPMNHLCHK

SEQ ID NO: 360 - protein, 17 aa, Artificial Sequence
  Synthetic
AFNAVKRLLDQARQLGR

SEQ ID NO: 361 - protein, 17 aa, Artificial Sequence
  Synthetic
AAKNALQKFIEEMKKIK

SEQ ID NO: 362 - protein, 20 aa, Artificial Sequence
  Synthetic
EVKKIWATIIERLYKLWRDW

SEQ ID NO: 363 - protein, 12 aa, Artificial Sequence
  Synthetic
GLKTAYRRIYGI

SEQ ID NO: 364 - protein, 12 aa, Artificial Sequence
  Synthetic
GLKTAYKRIYGI

SEQ ID NO: 365 - protein, 12 aa, Artificial Sequence
  Synthetic
GLKTAYKRIYGI

SEQ ID NO: 366 - protein, 14 aa, Artificial Sequence
  Synthetic
LKDFLENLKRIMQK

SEQ ID NO: 367 - protein, 17 aa, Artificial Sequence
  Synthetic
QVLHQVQKLANELLRKL

SEQ ID NO: 368 - protein, 12 aa, Artificial Sequence
  Synthetic
CHRACGSCCAKC

SEQ ID NO: 369 - protein, 29 aa, Artificial Sequence
  Synthetic
QCLANGSKCYSHDVCCTKRCHNYAKKCVT

SEQ ID NO: 370 - protein, 18 aa, Artificial Sequence
  Synthetic
KSATTFIEKLTTFIRKAS

SEQ ID NO: 371 - protein, 23 aa, Artificial Sequence
  Synthetic
KGYYKGCKKCCSYAGQAMDKVTE

SEQ ID NO: 372 - protein, 20 aa, Artificial Sequence
  Synthetic
ILANFQRFLETAYRALRHLA

SEQ ID NO: 373 - protein, 16 aa, Artificial Sequence
  Synthetic
EGWSTLMRTVHSVIKR

SEQ ID NO: 374 - protein, 15 aa, Artificial Sequence
  Synthetic
DLSSVAKTLIHRLHK

SEQ ID NO: 375 - protein, 25 aa, Artificial Sequence
  Synthetic
YGCCRKGYNGCKRCCSYAGEAMDKV

SEQ ID NO: 376 - protein, 25 aa, Artificial Sequence
  Synthetic
YGCCRKGYNGCKRCCSYAGEAMDKV

SEQ ID NO: 377 - protein, 25 aa, Artificial Sequence
  Synthetic
YGCCRKGYNGCKRCCSYAGEAMDKV

SEQ ID NO: 378 - protein, 12 aa, Artificial Sequence
  Synthetic
VRKIYQAAKYLP

SEQ ID NO: 379 - protein, 16 aa, Artificial Sequence
  Synthetic
ASQLLKVLHKIWTQVP

SEQ ID NO: 380 - protein, 27 aa, Artificial Sequence
  Synthetic
VALVTGAGRGIGRSIAKTLAKSVSHVL

SEQ ID NO: 381 - protein, 17 aa, Artificial Sequence
  Synthetic
RWSSGFHKVFAEGTKLI

SEQ ID NO: 382 - protein, 17 aa, Artificial Sequence
  Synthetic
KEFLERLKSLIQRMIHQ

SEQ ID NO: 383 - protein, 15 aa, Artificial Sequence
  Synthetic
KLSNMLRNLMHLVNQ

SEQ ID NO: 384 - protein, 16 aa, Artificial Sequence
  Synthetic
RVIKCIDHICQYARNL

SEQ ID NO: 385 - protein, 16 aa, Artificial Sequence
  Synthetic
RVIKCIDHICQYARNL

SEQ ID NO: 386 - protein, 17 aa, Artificial Sequence
  Synthetic
KEFLERFKSLLQKMIHQ

SEQ ID NO: 387 - protein, 17 aa, Artificial Sequence
  Synthetic
KEFLERFKSLLQKMIHQ

SEQ ID NO: 388 - protein, 17 aa, Artificial Sequence
  Synthetic
KEFLERFKSLLQKMIHQ

SEQ ID NO: 389 - protein, 17 aa, Artificial Sequence
  Synthetic
KEFLERFKSLLQKMIHQ

SEQ ID NO: 390 - protein, 17 aa, Artificial Sequence
  Synthetic
KEFLERFKSLLQKMIHQ

SEQ ID NO: 391 - protein, 17 aa, Artificial Sequence
  Synthetic
KEFLERFKSLLQKMIHQ

SEQ ID NO: 392 - protein, 17 aa, Artificial Sequence
  Synthetic
KEFLERFKSLLQKMIHQ

SEQ ID NO: 393 - protein, 17 aa, Artificial Sequence
  Synthetic
KEFLERFKSLLQKMIHQ

SEQ ID NO: 394 - protein, 17 aa, Artificial Sequence
  Synthetic
KEFLERLKSLIQKMIHQ

SEQ ID NO: 395 - protein, 17 aa, Artificial Sequence
  Synthetic
KEFLERLKSLIQKMIHQ

SEQ ID NO: 396 - protein, 17 aa, Artificial Sequence
  Synthetic
HMLRDLRDAFSRVKTFF

SEQ ID NO: 397 - protein, 17 aa, Artificial Sequence
  Synthetic
HMLRDLRDAFSRVKTFF

SEQ ID NO: 398 - protein, 17 aa, Artificial Sequence
  Synthetic
HMLRDLRDAFSRVKTFF

SEQ ID NO: 399 - protein, 17 aa, Artificial Sequence
  Synthetic
KEFLERLKSLLQKMIHQ

SEQ ID NO: 400 - protein, 16 aa, Artificial Sequence
  Synthetic
KKAASVIQKILKDFGL

SEQ ID NO: 401 - protein, 16 aa, Artificial Sequence
  Synthetic
KKAASVIQKILKDFGL

SEQ ID NO: 402 - protein, 15 aa, Artificial Sequence
  Synthetic
CMKKGGGHCQAYIGR

SEQ ID NO: 403 - protein, 14 aa, Artificial Sequence
  Synthetic
GALKCCKAMCGKVC

SEQ ID NO: 404 - protein, 15 aa, Artificial Sequence
  Synthetic
KTLARWAQNAFSKLL

SEQ ID NO: 405 - protein, 15 aa, Artificial Sequence
  Synthetic
KTLARWAQNAFSKLL

SEQ ID NO: 406 - protein, 17 aa, Artificial Sequence
  Synthetic
KEFLERLKSLLQKMVHQ

SEQ ID NO: 407 - protein, 12 aa, Artificial Sequence
  Synthetic
DKVREFFKRIKE

SEQ ID NO: 408 - protein, 15 aa, Artificial Sequence
  Synthetic
GKWVDEVCRSLKKYI

SEQ ID NO: 409 - protein, 15 aa, Artificial Sequence
  Synthetic
SAMERLNNWLKTFKH

SEQ ID NO: 410 - protein, 32 aa, Artificial Sequence
  Synthetic
VVSHIVSQIGDGQLQITTAKKCCHKVHNCCSK

SEQ ID NO: 411 - protein, 18 aa, Artificial Sequence
  Synthetic
RRCVNNFDDVFNSVFRKL

SEQ ID NO: 412 - protein, 16 aa, Artificial Sequence
  Synthetic
STLRDFLERLKKIMKE

SEQ ID NO: 413 - protein, 16 aa, Artificial Sequence
  Synthetic
STLRDFLERLKKIMKE

SEQ ID NO: 414 - protein, 14 aa, Artificial Sequence
  Synthetic
LKNLLERLKTIMKE

SEQ ID NO: 415 - protein, 23 aa, Artificial Sequence
  Synthetic
SKILRSLQAFLAIAARVFAHGAA

SEQ ID NO: 416 - protein, 23 aa, Artificial Sequence
  Synthetic
SKILRSLQAFLAIAARVFAHGAA

SEQ ID NO: 417 - protein, 17 aa, Artificial Sequence
  Synthetic
AHLGALLARYIQQARKA

SEQ ID NO: 418 - protein, 13 aa, Artificial Sequence
  Synthetic
MKYMGSFLRKAAT

SEQ ID NO: 419 - protein, 13 aa, Artificial Sequence
  Synthetic
AVKKYLNSILNGK

SEQ ID NO: 420 - protein, 13 aa, Artificial Sequence
  Synthetic
AVKKYLNSILNGK

SEQ ID NO: 421 - protein, 13 aa, Artificial Sequence
  Synthetic
AVKKYLNSILNGK

SEQ ID NO: 422 - protein, 13 aa, Artificial Sequence
  Synthetic
AVKKYLNSILNGK

SEQ ID NO: 423 - protein, 17 aa, Artificial Sequence
  Synthetic
KEYLERLKSLIQKMIHQ

SEQ ID NO: 424 - protein, 15 aa, Artificial Sequence
  Synthetic
KNVVEDIKKILQKMW

SEQ ID NO: 425 - protein, 27 aa, Artificial Sequence
  Synthetic
QRCNRWCHNGCGNGKGGYYKSMSHGGQ

SEQ ID NO: 426 - protein, 17 aa, Artificial Sequence
  Synthetic
REFLERMKSLLQKMIHQ

SEQ ID NO: 427 - protein, 14 aa, Artificial Sequence
  Synthetic
KEFLERLKSLIQRV

SEQ ID NO: 428 - protein, 14 aa, Artificial Sequence
  Synthetic
EDLYKRYGGFLRRI

SEQ ID NO: 429 - protein, 13 aa, Artificial Sequence
  Synthetic
SSVAGVAKKGYRK

SEQ ID NO: 430 - protein, 16 aa, Artificial Sequence
  Synthetic
RRLLEAAKEIVSLMHK

SEQ ID NO: 431 - protein, 20 aa, Artificial Sequence
  Synthetic
KTLGTAFKTLLHNLWDLLKQ

SEQ ID NO: 432 - protein, 19 aa, Artificial Sequence
  Synthetic
LIKRFSTLWRDIWQVASNF

SEQ ID NO: 433 - protein, 14 aa, Artificial Sequence
  Synthetic
LKDFLERLKAIMQK

SEQ ID NO: 434 - protein, 15 aa, Artificial Sequence
  Synthetic
ANPYQRGCEKINRCR

SEQ ID NO: 435 - protein, 17 aa, Artificial Sequence
  Synthetic
CRVARDFLRECMQHLKY

SEQ ID NO: 436 - protein, 12 aa, Artificial Sequence
  Synthetic
KTLGKIAEKCDR

SEQ ID NO: 437 - protein, 16 aa, Artificial Sequence
  Synthetic
QRCNRWCHNGCGNGKG

SEQ ID NO: 438 - protein, 22 aa, Artificial Sequence
  Synthetic
SKAKDAIAGLFTKAKSALKDVL

SEQ ID NO: 439 - protein, 15 aa, Artificial Sequence
  Synthetic
KEFLERLKSLIQRMI

SEQ ID NO: 440 - protein, 14 aa, Artificial Sequence
  Synthetic
RKAISELIRVMKDL

SEQ ID NO: 441 - protein, 16 aa, Artificial Sequence
  Synthetic
KTIQSWLNKFLSCLHI

SEQ ID NO: 442 - protein, 15 aa, Artificial Sequence
  Synthetic
MSAIVKVVSNIIRPL

SEQ ID NO: 443 - protein, 17 aa, Artificial Sequence
  Synthetic
QEFLNSFSKLMQKLFKN

SEQ ID NO: 444 - protein, 17 aa, Artificial Sequence
  Synthetic
QEFLNSFSKLMQKLFKN

SEQ ID NO: 445 - protein, 12 aa, Artificial Sequence
  Synthetic
ADKCLRYLLKNI

SEQ ID NO: 446 - protein, 14 aa, Artificial Sequence
  Synthetic
FKNCVKNILKDCQT

SEQ ID NO: 447 - protein, 15 aa, Artificial Sequence
  Synthetic
LARRMNEVFKEMLRP

SEQ ID NO: 448 - protein, 12 aa, Artificial Sequence
  Synthetic
CKWVEKAWKGLL

SEQ ID NO: 449 - protein, 13 aa, Artificial Sequence
  Synthetic
ISVAATCAKKIYK

SEQ ID NO: 450 - protein, 16 aa, Artificial Sequence
  Synthetic
NELKELVKKASDIIKK

SEQ ID NO: 451 - protein, 15 aa, Artificial Sequence
  Synthetic
NIQKCCSNGCGHVCK

SEQ ID NO: 452 - protein, 20 aa, Artificial Sequence
  Synthetic
NGLLQRIQSWWKNLFQHGAS

SEQ ID NO: 453 - protein, 16 aa, Artificial Sequence
  Synthetic
TTLKDFLENLKRIMQK

SEQ ID NO: 454 - protein, 17 aa, Artificial Sequence
  Synthetic
FREIPQCINSICKCMKG

SEQ ID NO: 455 - protein, 16 aa, Artificial Sequence
  Synthetic
DALSKLFRIYSNFLRG

SEQ ID NO: 456 - protein, 16 aa, Artificial Sequence
  Synthetic
DALSKLFRIYSNFLRG

SEQ ID NO: 457 - protein, 12 aa, Artificial Sequence
  Synthetic
GYNAAYNRYFRK

SEQ ID NO: 458 - protein, 12 aa, Artificial Sequence
  Synthetic
GYNAAYNRYFRK

SEQ ID NO: 459 - protein, 15 aa, Artificial Sequence
  Synthetic
DSIFSKMYNCWRKCA

SEQ ID NO: 460 - protein, 13 aa, Artificial Sequence
  Synthetic
FRFLKGYWSKFTD

SEQ ID NO: 461 - protein, 15 aa, Artificial Sequence
  Synthetic
QELFSLLKRLINKVN

SEQ ID NO: 462 - protein, 15 aa, Artificial Sequence
  Synthetic
QELFSLLKRLINKVN

SEQ ID NO: 463 - protein, 16 aa, Artificial Sequence
  Synthetic
KLIDTVIKQLRNLIAT

SEQ ID NO: 464 - protein, 16 aa, Artificial Sequence
  Synthetic
LLEKIKTCWNKILSGT

SEQ ID NO: 465 - protein, 21 aa, Artificial Sequence
  Synthetic
GGGGGGGGGARRMKGLAKKAM

SEQ ID NO: 466 - protein, 17 aa, Artificial Sequence
  Synthetic
AAWFQFFNRFLKYITSL

SEQ ID NO: 467 - protein, 16 aa, Artificial Sequence
  Synthetic
TTLKDFLENLKTILKK

SEQ ID NO: 468 - protein, 15 aa, Artificial Sequence
  Synthetic
VHPYSRGCSSITRCR

SEQ ID NO: 469 - protein, 17 aa, Artificial Sequence
  Synthetic
LQSILELVHRVLRHLAQ

SEQ ID NO: 470 - protein, 17 aa, Artificial Sequence
  Synthetic
LQSFLELVHRVLRHLAQ

SEQ ID NO: 471 - protein, 12 aa, Artificial Sequence
  Synthetic
CLKSAANAIKGI

SEQ ID NO: 472 - protein, 21 aa, Artificial Sequence
  Synthetic
SVYAQLSSVARTMIKRLEHFI

SEQ ID NO: 473 - protein, 11 aa, Artificial Sequence
  Synthetic
AVKKYLNSILN

SEQ ID NO: 474 - protein, 11 aa, Artificial Sequence
  Synthetic
AVKKYLNSILN

SEQ ID NO: 475 - protein, 11 aa, Artificial Sequence
  Synthetic
AVKKYLNSILN

SEQ ID NO: 476 - protein, 11 aa, Artificial Sequence
  Synthetic
AVKKYLNSILN

SEQ ID NO: 477 - protein, 15 aa, Artificial Sequence
  Synthetic
QVGQILRECAKNLKN

SEQ ID NO: 478 - protein, 14 aa, Artificial Sequence
  Synthetic
HKAVNELIRVIHQL

SEQ ID NO: 479 - protein, 33 aa, Artificial Sequence
  Synthetic
RLLHGLLHSLLHSFSHKFLDSFMRHMCTVCRNM

SEQ ID NO: 480 - protein, 12 aa, Artificial Sequence
  Synthetic
YWIHMLRYVAKT

SEQ ID NO: 481 - protein, 12 aa, Artificial Sequence
  Synthetic
AVKKYLAAVLGK

SEQ ID NO: 482 - protein, 12 aa, Artificial Sequence
  Synthetic
AVKKYLAAVLGK

SEQ ID NO: 483 - protein, 12 aa, Artificial Sequence
  Synthetic
AVKKYLAAVLGK

SEQ ID NO: 484 - protein, 12 aa, Artificial Sequence
  Synthetic
AVKKYLAAVLGK

SEQ ID NO: 485 - protein, 12 aa, Artificial Sequence
  Synthetic
AVKKYLAAVLGK

SEQ ID NO: 486 - protein, 12 aa, Artificial Sequence
  Synthetic
AVKKYLAAVLGK

SEQ ID NO: 487 - protein, 12 aa, Artificial Sequence
  Synthetic
AVKKYLAAVLGK

SEQ ID NO: 488 - protein, 12 aa, Artificial Sequence
  Synthetic
AVKKYLAAVLGK

SEQ ID NO: 489 - protein, 12 aa, Artificial Sequence
  Synthetic
AVKKYLAAVLGK

SEQ ID NO: 490 - protein, 12 aa, Artificial Sequence
  Synthetic
LKKFLQFIYYCC

SEQ ID NO: 491 - protein, 15 aa, Artificial Sequence
  Synthetic
LSDAKQWIKTMFKNW

SEQ ID NO: 492 - protein, 14 aa, Artificial Sequence
  Synthetic
AKGKQMLKEYANKV

SEQ ID NO: 493 - protein, 16 aa, Artificial Sequence
  Synthetic
GMFNKAYRKALGQLSA

SEQ ID NO: 494 - protein, 17 aa, Artificial Sequence
  Synthetic
GGLSTWKKLLDTILKIP

SEQ ID NO: 495 - protein, 13 aa, Artificial Sequence
  Synthetic
CLKNMASSFRNLN

SEQ ID NO: 496 - protein, 13 aa, Artificial Sequence
  Synthetic
CLKNMASSFRNLN

SEQ ID NO: 497 - protein, 15 aa, Artificial Sequence
  Synthetic
VTCASQALKRGCKSV

SEQ ID NO: 498 - protein, 17 aa, Artificial Sequence
  Synthetic
CSSWPHLLREILRAARL

SEQ ID NO: 499 - protein, 15 aa, Artificial Sequence
  Synthetic
RKAVSELKKVMNDLL

SEQ ID NO: 500 - protein, 20 aa, Artificial Sequence
  Synthetic
GQVRNFGNACEKIVHSCKTG

SEQ ID NO: 501 - protein, 14 aa, Artificial Sequence
  Synthetic
AFKSFWQKLFAIFG

SEQ ID NO: 502 - protein, 18 aa, Artificial Sequence
  Synthetic
ARLTKLAEQLMEKIKNLC

SEQ ID NO: 503 - protein, 12 aa, Artificial Sequence
  Synthetic
GKRYIRGCADTC

SEQ ID NO: 504 - protein, 16 aa, Artificial Sequence
  Synthetic
NKYRRGCSAATGCYRF

SEQ ID NO: 505 - protein, 15 aa, Artificial Sequence
  Synthetic
NKGMEEFKKIVRTLT

SEQ ID NO: 506 - protein, 14 aa, Artificial Sequence
  Synthetic
VATVKNCGKKLLAT

SEQ ID NO: 507 - protein, 17 aa, Artificial Sequence
  Synthetic
NMLRDLRDAFSRVKTFF

SEQ ID NO: 508 - protein, 17 aa, Artificial Sequence
  Synthetic
NMLRDLRDAFSRVKTFF

SEQ ID NO: 509 - protein, 16 aa, Artificial Sequence
  Synthetic
RKLKKYLEALDNFLNF

SEQ ID NO: 510 - protein, 27 aa, Artificial Sequence
  Synthetic
KHAHSMITSMLTFVSSVMNFGRSFVKD

SEQ ID NO: 511 - protein, 27 aa, Artificial Sequence
  Synthetic
KHAHSMITSMLTFVSSVMNFGRSFVKD

SEQ ID NO: 512 - protein, 12 aa, Artificial Sequence
  Synthetic
RAHQVLANLLKM

SEQ ID NO: 513 - protein, 15 aa, Artificial Sequence
  Synthetic
QKFLNKIYQYYQTFL

SEQ ID NO: 514 - protein, 12 aa, Artificial Sequence
  Synthetic
EKFKRIANSFLQ

SEQ ID NO: 515 - protein, 12 aa, Artificial Sequence
  Synthetic
EKFKRIANSFLQ

SEQ ID NO: 516 - protein, 13 aa, Artificial Sequence
  Synthetic
RHLARTLLTAARE

SEQ ID NO: 517 - protein, 21 aa, Artificial Sequence
  Synthetic
CARLRHVARGIADAQAVLSGL

SEQ ID NO: 518 - protein, 12 aa, Artificial Sequence
  Synthetic
RALKKIIKRLCR

SEQ ID NO: 519 - protein, 12 aa, Artificial Sequence
  Synthetic
CSRFVQCCRRVW

SEQ ID NO: 520 - protein, 12 aa, Artificial Sequence
  Synthetic
CSRFVQCCRRVW

SEQ ID NO: 521 - protein, 27 aa, Artificial Sequence
  Synthetic
KKIGRGLKKIGQKIKDFLGNLVPRTES

SEQ ID NO: 522 - protein, 27 aa, Artificial Sequence
  Synthetic
EKIGRGLKKIGQKIKDFWGNLVPRTES

SEQ ID NO: 523 - protein, 27 aa, Artificial Sequence
  Synthetic
EKIGKEFKRIVQRIKDFLQHLVPRTEA

SEQ ID NO: 524 - protein, 27 aa, Artificial Sequence
  Synthetic
EKIGKEFKRIVQRIKDFLQHLVPRTEA

SEQ ID NO: 525 - protein, 27 aa, Artificial Sequence
  Synthetic
EKIGKEFKRIVQRIKDFLQHLVPRTEA

SEQ ID NO: 526 - protein, 27 aa, Artificial Sequence
  Synthetic
KKIGEEFKRIVQRIKDFLQHLIPRTEA

SEQ ID NO: 527 - protein, 19 aa, Artificial Sequence
  Synthetic
RRWAQVVEQILRNLIDLIH

SEQ ID NO: 528 - protein, 14 aa, Artificial Sequence
  Synthetic
ARRIGERIKDIFRG

SEQ ID NO: 529 - protein, 13 aa, Artificial Sequence
  Synthetic
FIGGIISFFKRLF

SEQ ID NO: 530 - protein, 13 aa, Artificial Sequence
  Synthetic
FIGGIISFFKRLF

SEQ ID NO: 531 - protein, 12 aa, Artificial Sequence
  Synthetic
IGGIISFFKRLF

SEQ ID NO: 532 - protein, 34 aa, Artificial Sequence
  Synthetic
KRFKKFFKKVKKSVKKRLKKIFKKPMVIGVTIPF

SEQ ID NO: 533 - protein, 27 aa, Artificial Sequence
  Synthetic
KKIGGGLKKIGQKIKDFLGNLVPRTAS

SEQ ID NO: 534 - protein, 27 aa, Artificial Sequence
  Synthetic
EKIARGFKKIGQKINDFLGKLAPRTEA

SEQ ID NO: 535 - protein, 35 aa, Artificial Sequence
  Synthetic
VKRFKKFFKKLKNSVKKRVKKFFRKPRVIGVTFPF

SEQ ID NO: 536 - protein, 14 aa, Artificial Sequence
  Synthetic
FLKSFAKLIKKVIR

SEQ ID NO: 537 - protein, 14 aa, Artificial Sequence
  Synthetic
FLKSFAKLIRKVIR

SEQ ID NO: 538 - protein, 14 aa, Artificial Sequence
  Synthetic
FLKSLAKLIKKVIR

SEQ ID NO: 539 - protein, 11 aa, Artificial Sequence
  Synthetic
MKNLLDDLFGL

SEQ ID NO: 540 - protein, 14 aa, Artificial Sequence
  Synthetic
FLKSFAKLIKKVIR

SEQ ID NO: 541 - protein, 14 aa, Artificial Sequence
  Synthetic
FLKSFAKLIKKVIR

SEQ ID NO: 542 - protein, 16 aa, Artificial Sequence
  Synthetic
VQQIFQRIIRVLRSTL

SEQ ID NO: 543 - protein, 34 aa, Artificial Sequence; identical to SEQ ID NO: 532
  Synthetic

SEQ ID NO: 544 - protein, 34 aa, Artificial Sequence
  Synthetic
KRFKKFFKKVKKSVKKRLKKIFKKPMVIGVTFPF

SEQ ID NO: 545 - protein, 32 aa, Artificial Sequence
  Synthetic
FSKILRSIAKVFKGVGKVRKQFKTASDLDKNQ

SEQ ID NO: 546 - protein, 33 aa, Artificial Sequence
  Synthetic
VFGKILRSIAKVFKGVGKVRKQFKTASDLDKNQ

SEQ ID NO: 547 - protein, 15 aa, Artificial Sequence
  Synthetic
MRRCLQLIEKVIRKL

SEQ ID NO: 548 - protein, 11 aa, Artificial Sequence
  Synthetic
LAKLVKHIHEY

SEQ ID NO: 549 - protein, 11 aa, Artificial Sequence
  Synthetic
LAKLVKHIHEY

SEQ ID NO: 550 - protein, 12 aa, Artificial Sequence
  Synthetic
WKAILDAVKKVL

SEQ ID NO: 551 - protein, 35 aa, Artificial Sequence
  Synthetic
VKRFKKFFRKLKKSVKKRAKEFFKKPRVIGVSIPF

SEQ ID NO: 552 - protein, 14 aa, Artificial Sequence
  Synthetic
FLKSFEKLIKKVIR

SEQ ID NO: 553 - protein, 23 aa, Artificial Sequence
  Synthetic
KEFKRIVQRIKDFLQHLVPRTEA

SEQ ID NO: 554 - protein, 23 aa, Artificial Sequence
  Synthetic
KEFKRIVQRIKDFLQHLVPRTEA

SEQ ID NO: 555 - protein, 23 aa, Artificial Sequence
  Synthetic
KEFKRIVQRIKDFLQHLVPRTEA

SEQ ID NO: 556 - protein, 15 aa, Artificial Sequence
  Synthetic
MRRCLQLIDKVIRKL

SEQ ID NO: 557 - protein, 15 aa, Artificial Sequence
  Synthetic
MRRCLQLIDKVIRKL

SEQ ID NO: 558 - protein, 34 aa, Artificial Sequence
  Synthetic
WFQFFNRFLKYITSLTNTTILGPANFTLPFYSSI

SEQ ID NO: 559 - protein, 15 aa, Artificial Sequence
  Synthetic
MRRCLQLIDKVIRKL

SEQ ID NO: 560 - protein, 15 aa, Artificial Sequence
  Synthetic
DVFSSIFRNIFNLFR

SEQ ID NO: 561 - protein, 15 aa, Artificial Sequence
  Synthetic
MRRCLQLIDKVIRKL

SEQ ID NO: 562 - protein, 26 aa, Artificial Sequence
  Synthetic
KIGEEFKRIVQRIKDFLRNLVPRTES

SEQ ID NO: 563 - protein, 23 aa, Artificial Sequence
  Synthetic
EEFKRIVQRIKDFLRNLVPRTES

SEQ ID NO: 564 - protein, 35 aa, Artificial Sequence
  Synthetic
VKRFKKFFKKLKNSVKKRAKKFFKKPRVIGVSIPF

SEQ ID NO: 565 - protein, 29 aa, Artificial Sequence
  Synthetic
VGGLRSLGRKILRAWKKYGPIIVPIIRIG

SEQ ID NO: 566 - protein, 23 aa, Artificial Sequence
  Synthetic
EEFKRIVQRIKDFLQHLIPRTEA

SEQ ID NO: 567 - protein, 15 aa, Artificial Sequence
  Synthetic
MRKCLQLIDKVIRKL

SEQ ID NO: 568 - protein, 15 aa, Artificial Sequence
  Synthetic
MRRCLQLIDKVIRKL

SEQ ID NO: 569 - protein, 15 aa, Artificial Sequence
  Synthetic
MRRCLQLIDKVIRKL

SEQ ID NO: 570 - protein, 15 aa, Artificial Sequence
  Synthetic
MRRCLQLIDKVIRKL

SEQ ID NO: 571 - protein, 15 aa, Artificial Sequence
  Synthetic
MRRCLQLIDKVIRKL

SEQ ID NO: 572 - protein, 13 aa, Artificial Sequence
  Synthetic
FVQWFSKFLGRIL

SEQ ID NO: 573 - protein, 30 aa, Artificial Sequence
  Synthetic
VRGLRRLGRKIAHGVKKYGPTVLRIIRIAG

SEQ ID NO: 574 - protein, 30 aa, Artificial Sequence; identical to SEQ ID NO: 573
  Synthetic

SEQ ID NO: 575 - protein, 15 aa, Artificial Sequence
  Synthetic
EFLKSFAKLIKKVIR

SEQ ID NO: 576 - protein, 15 aa, Artificial Sequence
  Synthetic
MRRCLQFIDKVIRKL

SEQ ID NO: 577 - protein, 14 aa, Artificial Sequence
  Synthetic
FLKSFAKLIKQVIR

SEQ ID NO: 578 - protein, 15 aa, Artificial Sequence
  Synthetic
MRRCLQLIDKVIRKL

SEQ ID NO: 579 - protein, 14 aa, Artificial Sequence
  Synthetic
FLKSFAKLIKQVIR

SEQ ID NO: 580 - protein, 32 aa, Artificial Sequence
  Synthetic
FAKILKSIAKFFKGVGKVRKQFKEASDLDKNQ

SEQ ID NO: 581 - protein, 14 aa, Artificial Sequence
  Synthetic
RRCLQLIDKVIRKL

SEQ ID NO: 582 - protein, 14 aa, Artificial Sequence
  Synthetic
EFLKSFAKLIKKVI

SEQ ID NO: 583 - protein, 12 aa, Artificial Sequence
  Synthetic
LLKIAKGIIKSL

SEQ ID NO: 584 - protein, 15 aa, Artificial Sequence
  Synthetic
MRRCLQLIDKVIRKL

SEQ ID NO: 585 - protein, 15 aa, Artificial Sequence
  Synthetic
MRRCLQLIDKVVRKL

SEQ ID NO: 586 - protein, 15 aa, Artificial Sequence
  Synthetic
EFLKSFAKLIKQVIR

SEQ ID NO: 587 - protein, 15 aa, Artificial Sequence
  Synthetic
EFLKSFAKLIKQVIR

SEQ ID NO: 588 - protein, 15 aa, Artificial Sequence
  Synthetic
MRRCLQLIDKVMRKL

SEQ ID NO: 589 - protein, 35 aa, Artificial Sequence
  Synthetic
VKRFKKFFKKLKNSVKKRAKKFFKKPKVIGVTFPF

SEQ ID NO: 590 - protein, 17 aa, Artificial Sequence
  Synthetic
TIIERLYKLWRDWKRKV

SEQ ID NO: 591 - protein, 32 aa, Artificial Sequence
  Synthetic
ISKVLRAIAKFFKGVGKARKQFKEASDLDKNQ

SEQ ID NO: 592 - protein, 15 aa, Artificial Sequence
  Synthetic
MRRCLQLIDKAIRKI

SEQ ID NO: 593 - protein, 12 aa, Artificial Sequence
  Synthetic
FRKIVSTIKNVV

SEQ ID NO: 594 - protein, 39 aa, Artificial Sequence
  Synthetic
WLRKLGKKIERIGQHTRDASIQVLGIAQQAANVAATARG

SEQ ID NO: 595 - protein, 39 aa, Artificial Sequence; identical to SEQ ID NO: 594
  Synthetic

SEQ ID NO: 596 - protein, 39 aa, Artificial Sequence; identical to SEQ ID NO: 594
  Synthetic

SEQ ID NO: 597 - protein, 39 aa, Artificial Sequence; identical to SEQ ID NO: 594
  Synthetic

SEQ ID NO: 598 - protein, 15 aa, Artificial Sequence
  Synthetic
MRKCLQLVDKVIRKL

SEQ ID NO: 599 - protein, 39 aa, Artificial Sequence
  Synthetic
WLKKLGKRIERIGQHTRDATIQGLGIAQQAANVAATARG

SEQ ID NO: 600 - protein, 39 aa, Artificial Sequence; identical to SEQ ID NO: 599
  Synthetic

SEQ ID NO: 601 - protein, 39 aa, Artificial Sequence; identical to SEQ ID NO: 599
  Synthetic

SEQ ID NO: 602 - protein, 39 aa, Artificial Sequence; identical to SEQ ID NO: 599
  Synthetic

SEQ ID NO: 603 - protein, 39 aa, Artificial Sequence; identical to SEQ ID NO: 599
  Synthetic

SEQ ID NO: 604 - protein, 39 aa, Artificial Sequence; identical to SEQ ID NO: 599
  Synthetic

SEQ ID NO: 605 - protein, 39 aa, Artificial Sequence; identical to SEQ ID NO: 599
  Synthetic

SEQ ID NO: 606 - protein, 39 aa, Artificial Sequence; identical to SEQ ID NO: 599
  Synthetic

SEQ ID NO: 607 - protein, 39 aa, Artificial Sequence; identical to SEQ ID NO: 599
  Synthetic

SEQ ID NO: 608 - protein, 13 aa, Artificial Sequence
  Synthetic
FIGGIISFIKKLF

SEQ ID NO: 609 - protein, 13 aa, Artificial Sequence
  Synthetic
FIGGIISFIKKLF

SEQ ID NO: 610 - protein, 13 aa, Artificial Sequence
  Synthetic
FIGGIISLIKKLF

SEQ ID NO: 611 - protein, 14 aa, Artificial Sequence
  Synthetic
EFLKSFAKLIQKVI

SEQ ID NO: 612 - protein, 15 aa, Artificial Sequence
  Synthetic
MRRCLQLVDKVIRKL

SEQ ID NO: 613 - protein, 36 aa, Artificial Sequence
  Synthetic
RRFKKFLKKVEGAGRRVANAAQKGLPLAAGVKGLVG

SEQ ID NO: 614 - protein, 14 aa, Artificial Sequence
  Synthetic
FLKSFAKLIQQVIR

SEQ ID NO: 615 - protein, 28 aa, Artificial Sequence
  Synthetic
FFGKMKEYFKKFGASFKRRFANLKKRLG

SEQ ID NO: 616 - protein, 15 aa, Artificial Sequence
  Synthetic
MRRCLQLIDKAIKKL

SEQ ID NO: 617 - protein, 11 aa, Artificial Sequence
  Synthetic
LKKWFKRCPKY

SEQ ID NO: 618 - protein, 23 aa, Artificial Sequence
  Synthetic
FVKRLLDEIKTCWNKILRGAKKH

SEQ ID NO: 619 - protein, 15 aa, Artificial Sequence
  Synthetic
EFLKSFEKLIQKVIR

SEQ ID NO: 620 - protein, 15 aa, Artificial Sequence
  Synthetic
MRRCLQFVDKVIKRL

SEQ ID NO: 621 - protein, 15 aa, Artificial Sequence
  Synthetic
EFLQSFGKLINKVIR

SEQ ID NO: 622 - protein, 27 aa, Artificial Sequence
  Synthetic
EKIGGGLKKVGQKIKDFLGNLVPRTAS

SEQ ID NO: 623 - protein, 27 aa, Artificial Sequence
  Synthetic
EKIGGGLKKVGQKIKDFLGNLVPRTAS

SEQ ID NO: 624 - protein, 27 aa, Artificial Sequence
  Synthetic
EKIGGGLKKVGQKIKDFLGNLVPRTAS

SEQ ID NO: 625 - protein, 27 aa, Artificial Sequence
  Synthetic
EKIGGGLKKVGQKIKDFLGNLVPRTAS

SEQ ID NO: 626 - protein, 23 aa, Artificial Sequence
  Synthetic
FVKRLLDEIKTCWNKILRGAKKH

SEQ ID NO: 627 - protein, 34 aa, Artificial Sequence
  Synthetic
LKKLGKKIEKAGKRVFNAVQKGLPVAAGVQALGR

SEQ ID NO: 628 - protein, 13 aa, Artificial Sequence
  Synthetic
LKGLIKKVASLLN

SEQ ID NO: 629 - protein, 14 aa, Artificial Sequence
  Synthetic
FLKSFAKLIQQVIR

SEQ ID NO: 630 - protein, 11 aa, Artificial Sequence
  Synthetic
LDDLLSKFPDY

SEQ ID NO: 631 - protein, 27 aa, Artificial Sequence
  Synthetic
EKIGEKLKKIGQKIKNFFQKLVPQPEQ

SEQ ID NO: 632 - protein, 38 aa, Artificial Sequence
  Synthetic
WLRKIGKKIERVGQHTRDATIQVLGIAQQAANVAATAR

SEQ ID NO: 633 - protein, 31 aa, Artificial Sequence
  Synthetic
KFGKRLEKLGRNVFRAAKKALPVIAGYKALG

SEQ ID NO: 634 - protein, 14 aa, Artificial Sequence
  Synthetic
FLKSFAKLIQQVIR

SEQ ID NO: 635 - protein, 14 aa, Artificial Sequence
  Synthetic
EFLKSFAKLIQKVI

SEQ ID NO: 636 - protein, 39 aa, Artificial Sequence
  Synthetic
WLKKIGKKIERIGQHTRDATIQGLGIAQQAANVAATARG

SEQ ID NO: 637 - protein, 15 aa, Artificial Sequence
  Synthetic
MRRCLQLIDKAIRKL

SEQ ID NO: 638 - protein, 15 aa, Artificial Sequence
  Synthetic
MRRCLQLIDKVARKL

SEQ ID NO: 639 - protein, 24 aa, Artificial Sequence
  Synthetic
CCDLIRKCWHDIKECWKRCHGGKV

SEQ ID NO: 640 - protein, 14 aa, Artificial Sequence
  Synthetic
FLKSFANLIKQVIR

SEQ ID NO: 641 - protein, 21 aa, Artificial Sequence
  Synthetic
FLKRLLREIKTCWNKILKGSI

SEQ ID NO: 642 - protein, 21 aa, Artificial Sequence
  Synthetic
FLKRLLREIKTCWNKILKGSI

SEQ ID NO: 643 - protein, 23 aa, Artificial Sequence
  Synthetic
FVKRLLDEIKTCWNKILRGAKKH

SEQ ID NO: 644 - protein, 15 aa, Artificial Sequence
  Synthetic
EFLKSFAKLIQQVIR

SEQ ID NO: 645 - protein, 14 aa, Artificial Sequence
  Synthetic
FLQSFAKLIKQVIR

SEQ ID NO: 646 - protein, 11 aa, Artificial Sequence
  Synthetic
SLLSLIRKLIT

SEQ ID NO: 647 - protein, 26 aa, Artificial Sequence
  Synthetic
FFKWISKFIRRLSKCGIKSITSKAYK

SEQ ID NO: 648 - protein, 27 aa, Artificial Sequence
  Synthetic
EKIEGGLKKLVQKIKDFFGKFAPRTES

SEQ ID NO: 649 - protein, 23 aa, Artificial Sequence
  Synthetic
FVKRLLDEIKTCWNKILRGAKKH

SEQ ID NO: 650 - protein, 35 aa, Artificial Sequence
  Synthetic
KIFKKIEKMGRNIRDGIVKAGPAIEVLGSAKAIGK

SEQ ID NO: 651 - protein, 28 aa, Artificial Sequence
  Synthetic
GRFGRFLRKIRRFRPKVTITIQGSARFG

SEQ ID NO: 652 - protein, 13 aa, Artificial Sequence
  Synthetic
WKKLLDTILKIPV

SEQ ID NO: 653 - protein, 15 aa, Artificial Sequence
  Synthetic
FLKSFAKLIQKVIKS

SEQ ID NO: 654 - protein, 16 aa, Artificial Sequence
  Synthetic
IRRCLQLIDKAVRKLY

SEQ ID NO: 655 - protein, 26 aa, Artificial Sequence
  Synthetic
LDALHDLMSSVIRLLKNINKRFGCAL

SEQ ID NO: 656 - protein, 21 aa, Artificial Sequence
  Synthetic
FLKRLLREIKTCWNKILKGSI

SEQ ID NO: 657 - protein, 21 aa, Artificial Sequence
  Synthetic
FLKRLLREIKTCWNKILKGSI

SEQ ID NO: 658 - protein, 21 aa, Artificial Sequence
  Synthetic
FLKRLLREIKTCWNKILKGSI

SEQ ID NO: 659 - protein, 25 aa, Artificial Sequence
  Synthetic
ILANIHKIIKAYQRSIIKLPVTKGL

SEQ ID NO: 660 - protein, 21 aa, Artificial Sequence
  Synthetic
IHHIFRGIVHAGRSIGRFLTG

SEQ ID NO: 661 - protein, 28 aa, Artificial Sequence
  Synthetic
KPLKEFLERLKSLIQKMIHQHLSRTHGI

SEQ ID NO: 662 - protein, 22 aa, Artificial Sequence
  Synthetic
KNLKEFLERLKSLIQKMIHQHL

SEQ ID NO: 663 - protein, 15 aa, Artificial Sequence
  Synthetic
WKKIASIGKEVLKAL

SEQ ID NO: 664 - protein, 39 aa, Artificial Sequence
  Synthetic
WLKKIGKKIERVGQHTRDATIQTIAVAQQAANVAATARG

SEQ ID NO: 665 - protein, 39 aa, Artificial Sequence
  Synthetic
WLKKIGKKIERVGQHTRDATIQGLGIAQQAANVAATARG

SEQ ID NO: 666 - protein, 39 aa, Artificial Sequence
  Synthetic
WLKKIGKKIERVGQHTRDATIQGLGVAQQAANVAATARG

SEQ ID NO: 667 - protein, 39 aa, Artificial Sequence; identical to SEQ ID NO: 666
  Synthetic

SEQ ID NO: 668 - protein, 39 aa, Artificial Sequence; identical to SEQ ID NO: 665
  Synthetic

SEQ ID NO: 669 - protein, 39 aa, Artificial Sequence; identical to SEQ ID NO: 665
  Synthetic

SEQ ID NO: 670 - protein, 39 aa, Artificial Sequence
  Synthetic
WLKKIGKKIERVGQHTRDATIQVIGVAQQAANVAATARG

SEQ ID NO: 671 - protein, 23 aa, Artificial Sequence
  Synthetic
ARSWKSMAKKLKEYMEKLKQRAG

SEQ ID NO: 672 - protein, 14 aa, Artificial Sequence
  Synthetic
LRSCWNKFEKIISR

SEQ ID NO: 673 - protein, 26 aa, Artificial Sequence
  Synthetic
LFQKIKRWWKRIFDREASRSARALRR

SEQ ID NO: 674 - protein, 12 aa, Artificial Sequence
  Synthetic
FRKIATVVKNLV

SEQ ID NO: 675 - protein, 23 aa, Artificial Sequence
  Synthetic
FVKRLLDEIKTCWNKILRGAKKH

SEQ ID NO: 676 - protein, 12 aa, Artificial Sequence
  Synthetic
WKALLDAAKKVL

SEQ ID NO: 677 - protein, 14 aa, Artificial Sequence
  Synthetic
LRSCWNKFEKLISR

SEQ ID NO: 678 - protein, 14 aa, Artificial Sequence
  Synthetic
KEFLQSFSKLMKKV

SEQ ID NO: 679 - protein, 11 aa, Artificial Sequence
  Synthetic
NALGGLIKKIG

SEQ ID NO: 680 - protein, 11 aa, Artificial Sequence
  Synthetic
NALGGLIKKIG

SEQ ID NO: 681 - protein, 33 aa, Artificial Sequence
  Synthetic
KIFKKIEKVGRNIRNGIIKAGPAVAVLGEAKAL

SEQ ID NO: 682 - protein, 20 aa, Artificial Sequence
  Synthetic
VKRFIEKLRTFLRKLSRGAK

SEQ ID NO: 683 - protein, 35 aa, Artificial Sequence
  Synthetic
KVFKKIEKMGRNIRDGIVKAGPAIEVLGSAKALGK

SEQ ID NO: 684 - protein, 12 aa, Artificial Sequence
  Synthetic
LGKFCDEIKRIV

SEQ ID NO: 685 - protein, 38 aa, Artificial Sequence
  Synthetic
IKAIKTVGKAVGKGLRAINIASTANDVFNFLKPKKRKH

SEQ ID NO: 686 - protein, 38 aa, Artificial Sequence; identical to SEQ ID NO: 685
  Synthetic

SEQ ID NO: 687 - protein, 15 aa, Artificial Sequence
  Synthetic
IKDILAKLVKVLGHV

SEQ ID NO: 688 - protein, 21 aa, Artificial Sequence
  Synthetic
FLKRLLREIKTCWNKILNSSI

SEQ ID NO: 689 - protein, 13 aa, Artificial Sequence
  Synthetic
LKGIFKKVASLLT

SEQ ID NO: 690 - protein, 35 aa, Artificial Sequence
  Synthetic
KLFKKIEKVGRNVRDGLIKAGPAIAVIGQAKSLGK

SEQ ID NO: 691 - protein, 14 aa, Artificial Sequence
  Synthetic
KEFLERLKSLIQRV

SEQ ID NO: 692 - protein, 14 aa, Artificial Sequence
  Synthetic
DLIRKAVSVIKNIV

SEQ ID NO: 693 - protein, 17 aa, Artificial Sequence
  Synthetic
WNQILSNLHSIMQQMIN

SEQ ID NO: 694 - protein, 23 aa, Artificial Sequence
  Synthetic
KPIKEFLERLKSLIQKMIHQRLS

SEQ ID NO: 695 - protein, 23 aa, Artificial Sequence
  Synthetic
KPIKEFLERLKSLIQKMIHQRLS

SEQ ID NO: 696 - protein, 23 aa, Artificial Sequence
  Synthetic
FVKRLLDEIKTCWNKILRGAKKH

SEQ ID NO: 697 - protein, 34 aa, Artificial Sequence
  Synthetic
KVFKKIEKMGRNIRNGIVKAGPAIAVLGEAKALG

SEQ ID NO: 698 - protein, 26 aa, Artificial Sequence
  Synthetic
EELFQQYGEVMQKIMQDLLMDTPAKE

SEQ ID NO: 699 - protein, 13 aa, Artificial Sequence
  Synthetic
LKGLFKKVASLLT

SEQ ID NO: 700 - protein, 13 aa, Artificial Sequence
  Synthetic
IGNVLGGLLKNLG

SEQ ID NO: 701 - protein, 39 aa, Artificial Sequence
  Synthetic
WIRDFGKRIERVGQHTRDATIQTIAVAQQAANVAATLKG

SEQ ID NO: 702 - protein, 19 aa, Artificial Sequence
  Synthetic
LLQKIKTCWNKILRGIKEH

SEQ ID NO: 703 - protein, 25 aa, Artificial Sequence
  Synthetic
MRFMRRLVRNLQYLLLPITSSLLFI

SEQ ID NO: 704 - protein, 19 aa, Artificial Sequence
  Synthetic
LLQKIKTCWNKILRGIKEH

SEQ ID NO: 705 - protein, 12 aa, Artificial Sequence
  Synthetic
LKSIVSWAKKVL

SEQ ID NO: 706 - protein, 31 aa, Artificial Sequence
  Synthetic
QQLRRLFDAARNLPNICNIPNIGACPFRAWP

SEQ ID NO: 707 - protein, 12 aa, Artificial Sequence
  Synthetic
LKAIAALVKKVL

SEQ ID NO: 708 - protein, 27 aa, Artificial Sequence
  Synthetic
LFQKIKRWWKRIFEHEASRSARRLRAV

SEQ ID NO: 709 - protein, 27 aa, Artificial Sequence
  Synthetic
LFQKIKRWWKRIFEHEASRSARRLRAV

SEQ ID NO: 710 - protein, 27 aa, Artificial Sequence
  Synthetic
LFQKIKRWWKRIFEHEASRSARRLRAV

SEQ ID NO: 711 - protein, 25 aa, Artificial Sequence
  Synthetic
ELLKAMDYILSRWGKYLKNRNKNNS

SEQ ID NO: 712 - protein, 23 aa, Artificial Sequence
  Synthetic
KPIKEFLERLKSLIQKMIHQHLS

SEQ ID NO: 713 - protein, 23 aa, Artificial Sequence
  Synthetic
KPIKEFLERLKSLIQKMIHQHLS

SEQ ID NO: 714 - protein, 20 aa, Artificial Sequence
  Synthetic
CNHMPNLLTRCLQRLKRLKS

SEQ ID NO: 715 - protein, 12 aa, Artificial Sequence
  Synthetic
FKKIATVVKNLV

SEQ ID NO: 716 - protein, 12 aa, Artificial Sequence
  Synthetic
YIQLIRKILKSG

SEQ ID NO: 717 - protein, 12 aa, Artificial Sequence
  Synthetic
WKGIAAMAKKLL

SEQ ID NO: 718 - protein, 12 aa, Artificial Sequence
  Synthetic
WKGIAAMAKKLL

SEQ ID NO: 719 - protein, 13 aa, Artificial Sequence
  Synthetic
WKKIKSIIKAAMN

SEQ ID NO: 720 - protein, 23 aa, Artificial Sequence
  Synthetic
KEFKRIVQRIKDFLQHLVPRTEA

SEQ ID NO: 721 - protein, 34 aa, Artificial Sequence
  Synthetic
KVFKKIEKVGRNVRDGIIKAGPAIGVLGQAKALG

SEQ ID NO: 722 - protein, 33 aa, Artificial Sequence
  Synthetic
KIFKKIEKVGQNIRDGIVKAGPAVAVVGQAATI

SEQ ID NO: 723 - protein, 26 aa, Artificial Sequence
  Synthetic
VKELRRILDDWGEACKGCAEKSDFIR

SEQ ID NO: 724 - protein, 23 aa, Artificial Sequence
  Synthetic
FLKKLLQKIKTCWNKILRGIKEN

SEQ ID NO: 725 - protein, 15 aa, Artificial Sequence
  Synthetic
WKKIAEVGGKILSSL

SEQ ID NO: 726 - protein, 34 aa, Artificial Sequence
  Synthetic
LKKFGKKLEGVGKRVFKASEKALPVVTGFKALGK

SEQ ID NO: 727 - protein, 34 aa, Artificial Sequence
  Synthetic
LKKFGKKLEGVGKRVFKASEKALPVAVGIKALGK

SEQ ID NO: 728 - protein, 35 aa, Artificial Sequence
  Synthetic
KVFKKIEKVGRNIRDGVIKAGPAIAVVGQAKALGK

SEQ ID NO: 729 - protein, 11 aa, Artificial Sequence
  Synthetic
NALGGLIKKIG

SEQ ID NO: 730 - protein, 11 aa, Artificial Sequence
  Synthetic
NALGGLIKKIG

SEQ ID NO: 731 - protein, 11 aa, Artificial Sequence
  Synthetic
NALGGLIKKIG

SEQ ID NO: 732 - protein, 11 aa, Artificial Sequence
  Synthetic
NALGGLIKKIG

SEQ ID NO: 733 - protein, 11 aa, Artificial Sequence
  Synthetic
NALGGLIKKIG

SEQ ID NO: 734 - protein, 11 aa, Artificial Sequence
  Synthetic
NALGGLIKKIG

SEQ ID NO: 735 - protein, 11 aa, Artificial Sequence
  Synthetic
NALGGLIKKIG

SEQ ID NO: 736 - protein, 11 aa, Artificial Sequence
  Synthetic
NALGGLIKKIG

SEQ ID NO: 737 - protein, 11 aa, Artificial Sequence
  Synthetic
NALGGLIKKIG

SEQ ID NO: 738 - protein, 11 aa, Artificial Sequence
  Synthetic
NALGGLIKKIG

SEQ ID NO: 739 - protein, 11 aa, Artificial Sequence
  Synthetic
NALGGLIKKIG

SEQ ID NO: 740 - protein, 11 aa, Artificial Sequence
  Synthetic
NALGGLIKKIG

SEQ ID NO: 741 - protein, 27 aa, Artificial Sequence
  Synthetic
LWQRFLRWWNRLFHVSSNRLLREGGKK

SEQ ID NO: 742 - protein, 27 aa, Artificial Sequence
  Synthetic
LWQRFLRWWNRLFHVSSNRLLREGGKK

SEQ ID NO: 743 - protein, 11 aa, Artificial Sequence
  Synthetic
NAIGGLIKKIG

SEQ ID NO: 744 - protein, 39 aa, Artificial Sequence
  Synthetic
WLKKIGKKIERVGQNTRDATVKGLEVAQQAANVAATVRG

SEQ ID NO: 745 - protein, 27 aa, Artificial Sequence
  Synthetic
LFQKIKRWWKRIFEHEASRSARRLRAV

SEQ ID NO: 746 - protein, 27 aa, Artificial Sequence
  Synthetic
LFQKIKRWWKRIFEHEASRSARRLRAV

SEQ ID NO: 747 - protein, 12 aa, Artificial Sequence
  Synthetic
IAGGIASLVKNL

SEQ ID NO: 748 - protein, 34 aa, Artificial Sequence
  Synthetic
LKKLGKKLEGVGKRVFKASEKALPVAVGIKALGK

SEQ ID NO: 749 - protein, 11 aa, Artificial Sequence
  Synthetic
KYIKNLGKKIG

SEQ ID NO: 750 - protein, 19 aa, Artificial Sequence
  Synthetic
SIKSLLQKLIEFMKSLFKM

SEQ ID NO: 751 - protein, 37 aa, Artificial Sequence
  Synthetic
LKSFARVLKKVLPKAAKAGKALAKSMADENAIRQQNQ

SEQ ID NO: 752 - protein, 16 aa, Artificial Sequence
  Synthetic
KLIDTVIKQLRNLIAT

SEQ ID NO: 753 - protein, 24 aa, Artificial Sequence
  Synthetic
KLIKTFLEFISLLINSFAMGDLKY

SEQ ID NO: 754 - protein, 20 aa, Artificial Sequence
  Synthetic
FLKTLLQKIKTCWNKILRGH

SEQ ID NO: 755 - protein, 33 aa, Artificial Sequence
  Synthetic
LKKLGKKIEGAGKRVFKAAEKALPVVAGVKALG

SEQ ID NO: 756 - protein, 12 aa, Artificial Sequence
  Synthetic
FRKIATVVKNVV

SEQ ID NO: 757 - protein, 39 aa, Artificial Sequence
  Synthetic
WLKKIGKKIERVGQHTRDATIQTIGVAQQAANVAATLKG

SEQ ID NO: 758 - protein, 14 aa, Artificial Sequence
  Synthetic
AVDTLARLMHRALQ

SEQ ID NO: 759 - protein, 31 aa, Artificial Sequence
  Synthetic
LWKTIIKGAGKMIGSLAKNLLGSQAQPESEQ

SEQ ID NO: 760 - protein, 22 aa, Artificial Sequence
  Synthetic
ALSRLKAALQDMLRQLDRNPGC

SEQ ID NO: 761 - protein, 22 aa, Artificial Sequence
  Synthetic
ALSRLKAALQDMLRQLDRNPGC

SEQ ID NO: 762 - protein, 23 aa, Artificial Sequence
  Synthetic
KEFKRIVQRIKDFLQHLVPRTEA

SEQ ID NO: 763 - protein, 26 aa, Artificial Sequence
  Synthetic
NWRKILGKIAKVAAGLLGSMLAGYQV

SEQ ID NO: 764 - protein, 34 aa, Artificial Sequence
  Synthetic
WVTDLMNLMDRLIKKCHETNFKAKHCKKLKNNSP

SEQ ID NO: 765 - protein, 15 aa, Artificial Sequence
  Synthetic
FKNLIRKCVDVARKV

SEQ ID NO: 766 - protein, 35 aa, Artificial Sequence
  Synthetic
KIFKKIERVGQNVRDGIIKAGPAIQVLGTAKALGK

SEQ ID NO: 767 - protein, 13 aa, Artificial Sequence
  Synthetic
CYNGLAKCCRPFW

SEQ ID NO: 768 - protein, 34 aa, Artificial Sequence
  Synthetic
IDEIKSFIRSCIDEFDKLHTDLYVKYEKISSEQK

SEQ ID NO: 769 - protein, 11 aa, Artificial Sequence
  Synthetic
NALGGLIKKIG

SEQ ID NO: 770 - protein, 11 aa, Artificial Sequence
  Synthetic
NALGGLIKKIG

SEQ ID NO: 771 - protein, 23 aa, Artificial Sequence
  Synthetic
KNVKKFIEKLRTFIRKLSRDARV

SEQ ID NO: 772 - protein, 21 aa, Artificial Sequence
  Synthetic
FLNALKNFAKTAGKRLKSLLN

SEQ ID NO: 773 - protein, 13 aa, Artificial Sequence
  Synthetic
RLWELINSLLQQE

SEQ ID NO: 774 - protein, 12 aa, Artificial Sequence
  Synthetic
KTLGKIAEKCDR

SEQ ID NO: 775 - protein, 14 aa, Artificial Sequence
  Synthetic
RRCLQLAHKVIRKL

SEQ ID NO: 776 - protein, 29 aa, Artificial Sequence
  Synthetic
LFHTFEKFVKDMVKSATGSGSRRRRKKKP

SEQ ID NO: 777 - protein, 27 aa, Artificial Sequence
  Synthetic
LWQRFLRWWNRLFHVSSNRLLREGGKK

SEQ ID NO: 778 - protein, 36 aa, Artificial Sequence
  Synthetic
KFFKKIEKVGQNIRDGIIKAGPAVAVVGQAASITGK

SEQ ID NO: 779 - protein, 39 aa, Artificial Sequence
  Synthetic
WLKKIGKKIERVGQHTRDATIQGLGVAQQAPNVAATARG

SEQ ID NO: 780 - protein, 13 aa, Artificial Sequence
  Synthetic
FLGTLINLAKKIM

SEQ ID NO: 781 - protein, 34 aa, Artificial Sequence
  Synthetic
LKKLGKKLEGVGKRVFKASEKALPVLTGYKAIGK

SEQ ID NO: 782 - protein, 34 aa, Artificial Sequence; identical to SEQ ID NO: 781
  Synthetic

SEQ ID NO: 783 - protein, 35 aa, Artificial Sequence
  Synthetic
KFFKKIERVGQNVRDGLIKAGPAIQVLGAAKALGK

SEQ ID NO: 784 - protein, 24 aa, Artificial Sequence
  Synthetic
GRRLGEKIERIGQKIKDLSEFFQS

SEQ ID NO: 785 - protein, 14 aa, Artificial Sequence
  Synthetic
DLIRKAVAAIKNIV

SEQ ID NO: 786 - protein, 13 aa, Artificial Sequence
  Synthetic
VGEPLGGLIKKIG

SEQ ID NO: 787 - protein, 23 aa, Artificial Sequence
  Synthetic
ARSWASMAKKLKEYMEKLKQRAG

SEQ ID NO: 788 - protein, 30 aa, Artificial Sequence
  Synthetic
RALSRAARSIWDALKKISGFSGTSGKKIRY

SEQ ID NO: 789 - protein, 11 aa, Artificial Sequence
  Synthetic
NALGGLLKNIG

SEQ ID NO: 790 - protein, 11 aa, Artificial Sequence
  Synthetic
NALGGLLKNIG

SEQ ID NO: 791 - protein, 11 aa, Artificial Sequence
  Synthetic
NALGGLLKNIG

SEQ ID NO: 792 - protein, 22 aa, Artificial Sequence
  Synthetic
RIVDNIISVFRQLCEDCLVFLV

SEQ ID NO: 793 - protein, 35 aa, Artificial Sequence
  Synthetic
GFGTILKALAKIAGKVVKKLATKPGATYMLKQNLQ

SEQ ID NO: 794 - protein, 23 aa, Artificial Sequence
  Synthetic
ELITFMKNLLDHLRRIYRYRSVN

SEQ ID NO: 795 - protein, 15 aa, Artificial Sequence
  Synthetic
ITDILAKLGKVLAHV

SEQ ID NO: 796 - protein, 21 aa, Artificial Sequence
  Synthetic
EVAQFVKDLLRHLKRLYRHRV

SEQ ID NO: 797 - protein, 19 aa, Artificial Sequence
  Synthetic
LLQKIKTCWNKILRGITEH

SEQ ID NO: 798 - protein, 33 aa, Artificial Sequence
  Synthetic
KKLGKKIEKAGKRVFNAAQKGLPVAAGVQALGR

SEQ ID NO: 799 - protein, 12 aa, Artificial Sequence
  Synthetic
WKKLLDAAKQIL

SEQ ID NO: 800 - protein, 16 aa, Artificial Sequence
  Synthetic
MGKFARRFCKFMCGFC

SEQ ID NO: 801 - protein, 24 aa, Artificial Sequence
  Synthetic
EVAQFIKDLLRHLKKRFRDANVKA

SEQ ID NO: 802 - protein, 12 aa, Artificial Sequence
  Synthetic
SIVEGIAKAIRE

SEQ ID NO: 803 - protein, 17 aa, Artificial Sequence
  Synthetic
VIKTIGGVIGGLLKNLG

SEQ ID NO: 804 - protein, 26 aa, Artificial Sequence
  Synthetic
FQRLVREIAQDFKDIQLARRIRGDRA

SEQ ID NO: 805 - protein, 23 aa, Artificial Sequence
  Synthetic
KNVKKFIEKLRTFIRKLSRDARV

SEQ ID NO: 806 - protein, 23 aa, Artificial Sequence
  Synthetic
KNVKKFIEKLRTFIRKLSRDARV

SEQ ID NO: 807 - protein, 12 aa, Artificial Sequence
  Synthetic
LKAIAAFAKKLL

SEQ ID NO: 808 - protein, 18 aa, Artificial Sequence
  Synthetic
IIKVITRALRGARRLLKY

SEQ ID NO: 809 - protein, 12 aa, Artificial Sequence
  Synthetic
IATGIASLVKNL

SEQ ID NO: 810 - protein, 26 aa, Artificial Sequence
  Synthetic
LLRALDTVATCWEKLFALRASASRKS

SEQ ID NO: 811 - protein, 30 aa, Artificial Sequence
  Synthetic
RAWLDKLKNLGKVVGKVALGVVQNYLNPRQ

SEQ ID NO: 812 - protein, 11 aa, Artificial Sequence
  Synthetic
NALGGLLKNLG

SEQ ID NO: 813 - protein, 12 aa, Artificial Sequence
  Synthetic
LKAIAALAKKLL

SEQ ID NO: 814 - protein, 36 aa, Artificial Sequence
  Synthetic
KLFKKIEKVGQNIRDGIIKAGPAVAVVGQATQIAKG

SEQ ID NO: 815 - protein, 28 aa, Artificial Sequence
  Synthetic
LWQRFLRWWNRLFTGSAANSTRTLRTDN

SEQ ID NO: 816 - protein, 28 aa, Artificial Sequence
  Synthetic
LWQRFLRWWNRLFTGSAANSTRTLRTDN

SEQ ID NO: 817 - protein, 28 aa, Artificial Sequence
  Synthetic
LWQRFLRWWNRLFTGSAANSTRTLRTDN

SEQ ID NO: 818 - protein, 12 aa, Artificial Sequence
  Synthetic
LKALAALAKKIL

SEQ ID NO: 819 - protein, 12 aa, Artificial Sequence
  Synthetic
LKALLAVAKKIL

SEQ ID NO: 820 - protein, 35 aa, Artificial Sequence
  Synthetic
KVFKKIEKVGRHIRDGVIKAGPAITVVGQATALGK

SEQ ID NO: 821 - protein, 17 aa, Artificial Sequence
  Synthetic
VIKTIGGVLGGLLKNLG

SEQ ID NO: 822 - protein, 35 aa, Artificial Sequence
  Synthetic
GFGTILKALAKIAGKVVKKLATKPGATYMLKENLK

SEQ ID NO: 823 - protein, 35 aa, Artificial Sequence
  Synthetic
AFGTILKALAKIAAKVVKKLATKPGATYMLKQNLQ

SEQ ID NO: 824 - protein, 24 aa, Artificial Sequence
  Synthetic
LSRVWNNLSNLVQSSGKAREKGTL

SEQ ID NO: 825 - protein, 16 aa, Artificial Sequence
  Synthetic
FSDMATYCRRLIESLS

SEQ ID NO: 826 - protein, 33 aa, Artificial Sequence
  Synthetic
KVFKKIEKVGRNIRDGVIKAAPAIEVLGQAKAL

SEQ ID NO: 827 - protein, 15 aa, Artificial Sequence
  Synthetic
LSRILSTVIRTCYYL

SEQ ID NO: 828 - protein, 16 aa, Artificial Sequence
  Synthetic
ISKIGGVLGGLLKNLG

SEQ ID NO: 829 - protein, 16 aa, Artificial Sequence
  Synthetic
ISKIGGVLGGLLKNLG

SEQ ID NO: 830 - protein, 16 aa, Artificial Sequence
  Synthetic
ISKIGGVLGGLLKNLG

SEQ ID NO: 831 - protein, 35 aa, Artificial Sequence
  Synthetic
AFGTILKALAKIAGKVVKKLATKPGATYMLKENLQ

SEQ ID NO: 832 - protein, 13 aa, Artificial Sequence
  Synthetic
CRRYCRRITDACV

SEQ ID NO: 833 - protein, 15 aa, Artificial Sequence
  Synthetic
IMDILAKLGKVLAHV

SEQ ID NO: 834 - protein, 19 aa, Artificial Sequence
  Synthetic
MEKFLSDLHRLLQQLVKEK

SEQ ID NO: 835 - protein, 30 aa, Artificial Sequence
  Synthetic
MVKNMTDVLTTMTKLIKDVPRKNLIYVRLY

SEQ ID NO: 836 - protein, 15 aa, Artificial Sequence
  Synthetic
WKKIAEIGKQVLSAL

SEQ ID NO: 837 - protein, 30 aa, Artificial Sequence
  Synthetic
KAGEKIVRGLKNIGQRIKDFFGKLTPRTES

SEQ ID NO: 838 - protein, 13 aa, Artificial Sequence
  Synthetic
IGGVLGGLLKNLG

SEQ ID NO: 839 - protein, 13 aa, Artificial Sequence
  Synthetic
IGGVLGGLLKNLG

SEQ ID NO: 840 - protein, 13 aa, Artificial Sequence
  Synthetic
IGGVLGGLLKNLG

SEQ ID NO: 841 - protein, 13 aa, Artificial Sequence
  Synthetic
IGGVLGGLLKNLG

SEQ ID NO: 842 - protein, 11 aa, Artificial Sequence
  Synthetic
AVKKYLNSILN

SEQ ID NO: 843 - protein, 11 aa, Artificial Sequence
  Synthetic
AVKKYLNSILN

SEQ ID NO: 844 - protein, 11 aa, Artificial Sequence
  Synthetic
AVKKYLNSILN

SEQ ID NO: 845 - protein, 11 aa, Artificial Sequence
  Synthetic
AVKKYLNSILN

SEQ ID NO: 846 - protein, 15 aa, Artificial Sequence
  Synthetic
ILTTLANWARKFLGK

SEQ ID NO: 847 - protein, 11 aa, Artificial Sequence
  Synthetic
NALGGLLKNLG

SEQ ID NO: 848 - protein, 11 aa, Artificial Sequence
  Synthetic
NALGGLLKNLG

SEQ ID NO: 849 - protein, 16 aa, Artificial Sequence
  Synthetic
KIKTCWNKILRGIKEH

SEQ ID NO: 850 - protein, 16 aa, Artificial Sequence
  Synthetic
KIKTCWNKILRGIKEH

SEQ ID NO: 851 - protein, 35 aa, Artificial Sequence
  Synthetic
QICNTLSRVISSLTKSMHAVGCGDRRRSTHRSDEL

SEQ ID NO: 852 - protein, 26 aa, Artificial Sequence
  Synthetic
FFENIINLLDRLISTNPKVHQRLRYR

SEQ ID NO: 853 - protein, 19 aa, Artificial Sequence
  Synthetic
LLQKIKTCWNKILRGSKEH

SEQ ID NO: 854 - protein, 12 aa, Artificial Sequence
  Synthetic
WLKLGKAIIDAL

SEQ ID NO: 855 - protein, 29 aa, Artificial Sequence
  Synthetic
KLFDVLKKIIKVIVMVVDSTKANEERQKT

SEQ ID NO: 856 - protein, 25 aa, Artificial Sequence
  Synthetic
WMTLLKKVLKAAAKALNAVLVGANA

SEQ ID NO: 857 - protein, 12 aa, Artificial Sequence
  Synthetic
WKKMAATALKMI

SEQ ID NO: 858 - protein, 29 aa, Artificial Sequence
  Synthetic
RAWLDKLKSIGKVVGKVAIGVAKNLLNPQ

SEQ ID NO: 859 - protein, 12 aa, Artificial Sequence
  Synthetic
LKAIAAMAKKLL

SEQ ID NO: 860 - protein, 19 aa, Artificial Sequence
  Synthetic
GTLFDILKKVVEVIIKVVV

SEQ ID NO: 861 - protein, 14 aa, Artificial Sequence
  Synthetic
TEFLKSFTKLITQV

SEQ ID NO: 862 - protein, 11 aa, Artificial Sequence
  Synthetic
LKTLQKLMENY

SEQ ID NO: 863 - protein, 11 aa, Artificial Sequence
  Synthetic
LKTLQKLMENY

SEQ ID NO: 864 - protein, 11 aa, Artificial Sequence
  Synthetic
LKTLQKLMENY

SEQ ID NO: 865 - protein, 39 aa, Artificial Sequence
  Synthetic
RDLKKILNDWDESCDGCLEKGDFIKRIEELKPKYSRSEL

SEQ ID NO: 866 - protein, 39 aa, Artificial Sequence; identical to SEQ ID NO: 865
  Synthetic

SEQ ID NO: 867 - protein, 39 aa, Artificial Sequence; identical to SEQ ID NO: 865
  Synthetic

SEQ ID NO: 868 - protein, 39 aa, Artificial Sequence; identical to SEQ ID NO: 865
  Synthetic

SEQ ID NO: 869 - protein, 39 aa, Artificial Sequence; identical to SEQ ID NO: 865
  Synthetic

SEQ ID NO: 870 - protein, 23 aa, Artificial Sequence
  Synthetic
EVAQFVKDLLRHLRKLFHQGKFN

SEQ ID NO: 871 - protein, 13 aa, Artificial Sequence
  Synthetic
WKKIKSLIKAAMS

SEQ ID NO: 872 - protein, 15 aa, Artificial Sequence
  Synthetic
ILNTIINLAKKILGK

SEQ ID NO: 873 - protein, 12 aa, Artificial Sequence
  Synthetic
MLAKLGKVLAHV

SEQ ID NO: 874 - protein, 39 aa, Artificial Sequence
  Synthetic
RDLKKILNDWDESCDGCLEKTDFIKRIEELKPKYSRNEL

SEQ ID NO: 875 - protein, 39 aa, Artificial Sequence
  Synthetic
RDLKKILNDWDESCDGCLEKSDFIKRIEELKPKYSRNEL

SEQ ID NO: 876 - protein, 39 aa, Artificial Sequence
  Synthetic
RDLKKILNDWDESCDGCLEKSDFIKRIEELKPKYAHNEL

SEQ ID NO: 877 - protein, 22 aa, Artificial Sequence
  Synthetic
DKVKSMGEKLKQYIQTWKAKFG

SEQ ID NO: 878 - protein, 11 aa, Artificial Sequence
  Synthetic
SALGGLLKKIG

SEQ ID NO: 879 - protein, 11 aa, Artificial Sequence
  Synthetic
SALGGLLKKIG

SEQ ID NO: 880 - protein, 11 aa, Artificial Sequence
  Synthetic
SALGGLLKKIG

SEQ ID NO: 881 - protein, 23 aa, Artificial Sequence
  Synthetic
FQEYGAVLQKILQDVLGDTATAE

SEQ ID NO: 882 - protein, 12 aa, Artificial Sequence
  Synthetic
FVKTVAGHIANI

SEQ ID NO: 883 - protein, 30 aa, Artificial Sequence
  Synthetic
QWLTSCWSTLMRLIHQMAGRYRGTPLCLLR

SEQ ID NO: 884 - protein, 33 aa, Artificial Sequence
  Synthetic
ILRKAGEKIGGGLKKIGQKIKDFFGKLAPRTES

SEQ ID NO: 885 - protein, 23 aa, Artificial Sequence
  Synthetic
FLKRLLQEIKTCWNKILSGTKEH

SEQ ID NO: 886 - protein, 16 aa, Artificial Sequence
  Synthetic
NILNTIINLAKKILGK

SEQ ID NO: 887 - protein, 23 aa, Artificial Sequence
  Synthetic
NCCRKMTRLLKELLQISEMKSVW

SEQ ID NO: 888 - protein, 32 aa, Artificial Sequence
  Synthetic
LRKGGRCWNRCIGNTRQIGSCGVPFLKCCKRK

SEQ ID NO: 889 - protein, 25 aa, Artificial Sequence
  Synthetic
ENIRRVFNDCRDIIQRMHLRQYELL

SEQ ID NO: 890 - protein, 11 aa, Artificial Sequence
  Synthetic
SALGGLIKKIG

SEQ ID NO: 891 - protein, 11 aa, Artificial Sequence
  Synthetic
SALGGLIKKIG

SEQ ID NO: 892 - protein, 11 aa, Artificial Sequence
  Synthetic
SALGGLIKKIG

SEQ ID NO: 893 - protein, 11 aa, Artificial Sequence
  Synthetic
SALGGLIKKIG

SEQ ID NO: 894 - protein, 11 aa, Artificial Sequence
  Synthetic
SALGGLIKKIG

SEQ ID NO: 895 - protein, 35 aa, Artificial Sequence
  Synthetic
LSDAMQRIKTMFRNWYQKRRDIRRREGNKGSDSGV

SEQ ID NO: 896 - protein, 37 aa, Artificial Sequence
  Synthetic
IGAIKKAGKAIGKGLRAVNIASTAHDVYTFFKPKKRH

SEQ ID NO: 897 - protein, 30 aa, Artificial Sequence
  Synthetic
LTEMMKTIKYLIKYLIKKAERNLLYRFFIT

SEQ ID NO: 898 - protein, 23 aa, Artificial Sequence
  Synthetic
ALWKNMLKGIGKLAGKAALGAVK

SEQ ID NO: 899 - protein, 40 aa, Artificial Sequence
  Synthetic
NSLKEFGNNLKDTFESIPEATRKLMTSFAERLKNFRIPLL

SEQ ID NO: 900 - protein, 23 aa, Artificial Sequence
  Synthetic
EVIQLVKNLLNHLRRNFRHGNFK

SEQ ID NO: 901 - protein, 19 aa, Artificial Sequence
  Synthetic
GIIDIAKKLVGGIRNVLGI

SEQ ID NO: 902 - protein, 40 aa, Artificial Sequence
  Synthetic
VKELKNILGEWGEVCKGCTEKAELIKRIEELKPKYVKEEL

SEQ ID NO: 903 - protein, 19 aa, Artificial Sequence
  Synthetic
GILDIAKKLVGGIRNVLGI

SEQ ID NO: 904 - protein, 12 aa, Artificial Sequence
  Synthetic
CWNKILRGAKEY

SEQ ID NO: 905 - protein, 17 aa, Artificial Sequence
  Synthetic
IGKIGDFIKKAIAKYKN

SEQ ID NO: 906 - protein, 15 aa, Artificial Sequence
  Synthetic
KLAAKLKKVIQQLWE

SEQ ID NO: 907 - protein, 39 aa, Artificial Sequence
  Synthetic
KHFNKLVKKVKHTISETAHVAKDTAVIAGSGAAVVAATG

SEQ ID NO: 908 - protein, 23 aa, Artificial Sequence
  Synthetic
LNALKKVFQGIHEAIKLINNHVQ

SEQ ID NO: 909 - protein, 30 aa, Artificial Sequence
  Synthetic
RAWLDKLKSLGKVVGKVGLGVVQNYLNPRQ

SEQ ID NO: 910 - protein, 20 aa, Artificial Sequence
  Synthetic
TQAWTNFKKWFKKWFKKTFS

SEQ ID NO: 911 - protein, 20 aa, Artificial Sequence
  Synthetic
TQAWTNFKKWFKKWFKKTFS

SEQ ID NO: 912 - protein, 20 aa, Artificial Sequence
  Synthetic
TQAWTNFKKWFKKWFKKTFS

SEQ ID NO: 913 - protein, 20 aa, Artificial Sequence
  Synthetic
TQAWTNFKKWFKKWFKKTFS

SEQ ID NO: 914 - protein, 24 aa, Artificial Sequence
  Synthetic
LVDGASDVLDRVMKALDNVDKKYN

SEQ ID NO: 915 - protein, 12 aa, Artificial Sequence
  Synthetic
KIVQKMLKGVPK

SEQ ID NO: 916 - protein, 12 aa, Artificial Sequence
  Synthetic
KIVQKMLKGVPK

SEQ ID NO: 917 - protein, 18 aa, Artificial Sequence
  Synthetic
ARRFSTLFRHLIKMIMFV

SEQ ID NO: 918 - protein, 34 aa, Artificial Sequence
  Synthetic
LKKLGKKLEGAGKRVFNAAEKALPVVAGAKALGK

SEQ ID NO: 919 - protein, 34 aa, Artificial Sequence; identical to SEQ ID NO: 918
  Synthetic

SEQ ID NO: 920 - protein, 34 aa, Artificial Sequence; identical to SEQ ID NO: 918
  Synthetic

SEQ ID NO: 921 - protein, 11 aa, Artificial Sequence
  Synthetic
SALGGLIKKIG

SEQ ID NO: 922 - protein, 11 aa, Artificial Sequence
  Synthetic
SALGGLIKKIG

SEQ ID NO: 923 - protein, 11 aa, Artificial Sequence
  Synthetic
SALGGLIKKIG

SEQ ID NO: 924 - protein, 11 aa, Artificial Sequence
  Synthetic
SALGGLIKKIG

SEQ ID NO: 925 - protein, 11 aa, Artificial Sequence
  Synthetic
SALGGLIKKIG

SEQ ID NO: 926 - protein, 17 aa, Artificial Sequence
  Synthetic
LRRICGVVSGILDRLVE

SEQ ID NO: 927 - protein, 23 aa, Artificial Sequence
  Synthetic
EVAQFVKDLLRHLRKLFHQGTFN

SEQ ID NO: 928 - protein, 12 aa, Artificial Sequence
  Synthetic
IHKVVSAIKNVA

SEQ ID NO: 929 - protein, 16 aa, Artificial Sequence
  Synthetic
MLRDLRDAFSRVKTFF

SEQ ID NO: 930 - protein, 16 aa, Artificial Sequence
  Synthetic
MLRDLRDAFSRVKTFF

SEQ ID NO: 931 - protein, 16 aa, Artificial Sequence
  Synthetic
MLRDLRDAFSRVKTFF

SEQ ID NO: 932 - protein, 15 aa, Artificial Sequence
  Synthetic
VVDEIEELVQELSDV

SEQ ID NO: 933 - protein, 23 aa, Artificial Sequence
  Synthetic
LNTLKKVFQGLHEAIKLINNHVQ

SEQ ID NO: 934 - protein, 12 aa, Artificial Sequence
  Synthetic
SIVEGIAKAIRE

SEQ ID NO: 935 - protein, 30 aa, Artificial Sequence
  Synthetic
DCYRRFEKGVEKGQKCWRIPTGLRYSKEKE

SEQ ID NO: 936 - protein, 12 aa, Artificial Sequence
  Synthetic
NILEQYLKNMQN

SEQ ID NO: 937 - protein, 12 aa, Artificial Sequence
  Synthetic
NILEQYLKNMQN

SEQ ID NO: 938 - protein, 14 aa, Artificial Sequence
  Synthetic
DAAKKVVNVLKNLP

SEQ ID NO: 939 - protein, 28 aa, Artificial Sequence
  Synthetic
GRKYLKNVLKKLNRLKEKNKAKNSKENN

SEQ ID NO: 940 - protein, 39 aa, Artificial Sequence
  Synthetic
RDLKKILNDWDESCDGCLEKSDFIKRIEELKPKYAHGEL

SEQ ID NO: 941 - protein, 39 aa, Artificial Sequence
  Synthetic
RDLKKILNDWDESCDGCLEKSDFIKRIEELKPKYARSEL

SEQ ID NO: 942 - protein, 39 aa, Artificial Sequence; identical to SEQ ID NO: 941
  Synthetic

SEQ ID NO: 943 - protein, 19 aa, Artificial Sequence
  Synthetic
KFLDSFMRHMCTVCRNMHI

SEQ ID NO: 944 - protein, 23 aa, Artificial Sequence
  Synthetic
NKIRNIGGKVENPWKSQIRDWKN

SEQ ID NO: 945 - protein, 32 aa, Artificial Sequence
  Synthetic
KSFSSICKELCKLCQRCNPASNRRHGYWDHWW

SEQ ID NO: 946 - protein, 23 aa, Artificial Sequence
  Synthetic
EVAQFVKDLLRHLRKLFHQGTFN

SEQ ID NO: 947 - protein, 30 aa, Artificial Sequence
  Synthetic
RAWLDKLKSLGKVVGKVALGVAQNYLNPQQ

SEQ ID NO: 948 - protein, 30 aa, Artificial Sequence
  Synthetic
RAWLDKLKSLGKVVGKVAIGVAQHYLNPQQ

SEQ ID NO: 949 - protein, 22 aa, Artificial Sequence
  Synthetic
INTLKKVIQGLHEVIKLVSNHA

SEQ ID NO: 950 - protein, 17 aa, Artificial Sequence
  Synthetic
LVDVLGKVGGLIKKLLP

SEQ ID NO: 951 - protein, 16 aa, Artificial Sequence
  Synthetic
KIKTCWNKILRGITEH

SEQ ID NO: 952 - protein, 12 aa, Artificial Sequence
  Synthetic
WKKIGQHILSVL

SEQ ID NO: 953 - protein, 29 aa, Artificial Sequence
  Synthetic
LFKTLIKGAGKMLGHVAKQFLGSQGQPES

SEQ ID NO: 954 - protein, 38 aa, Artificial Sequence
  Synthetic
RGILDTLKQFAKGVGKDLVKGAAQGVLSTVSCKLAKTC

SEQ ID NO: 955 - protein, 15 aa, Artificial Sequence
  Synthetic
ADKCLRYLLKNIKNA

SEQ ID NO: 956 - protein, 19 aa, Artificial Sequence
  Synthetic
EVIKKFTKAMEKMKKNGRA

SEQ ID NO: 957 - protein, 19 aa, Artificial Sequence
  Synthetic
EVIKKFTKAMEKMKKNGRA

SEQ ID NO: 958 - protein, 19 aa, Artificial Sequence
  Synthetic
EVIKKFTKAMEKMKKNGRA

SEQ ID NO: 959 - protein, 12 aa, Artificial Sequence
  Synthetic
FLSALLGMLKNL

SEQ ID NO: 960 - protein, 20 aa, Artificial Sequence
  Synthetic
KEVIKKFTKAMEKMKKNGRA

SEQ ID NO: 961 - protein, 28 aa, Artificial Sequence
  Synthetic
QEFLNSFSKLMQKLFKNSTAERYGKSTI

SEQ ID NO: 962 - protein, 19 aa, Artificial Sequence
  Synthetic
NFIKRINDFLKKAKSPPSP

SEQ ID NO: 963 - protein, 16 aa, Artificial Sequence
  Synthetic
DKFNDCLNEMRRLIKL

SEQ ID NO: 964 - protein, 32 aa, Artificial Sequence; identical to SEQ ID NO: 945
  Synthetic

SEQ ID NO: 965 - protein, 13 aa, Artificial Sequence
  Synthetic
FISAIASFLGKFL

SEQ ID NO: 966 - protein, 30 aa, Artificial Sequence
  Synthetic
ALWKNMLKGIGKLAGKAALGAVKKLVGAES

SEQ ID NO: 967 - protein, 13 aa, Artificial Sequence
  Synthetic
EFFRQWWDIIQSK

SEQ ID NO: 968 - protein, 12 aa, Artificial Sequence
  Synthetic
ILGTILGLLKSL

SEQ ID NO: 969 - protein, 28 aa, Artificial Sequence
  Synthetic
QEFLNSFSKLMQKLFKNSTAERYGKSTI

SEQ ID NO: 970 - protein, 12 aa, Artificial Sequence
  Synthetic
ILGTILGLLKGL

SEQ ID NO: 971 - protein, 12 aa, Artificial Sequence
  Synthetic
ILGTILGLLKGL

SEQ ID NO: 972 - protein, 33 aa, Artificial Sequence
  Synthetic
  X (29)..(29): any amino acid
VKELKKILDDWGEMCKGCAEKSDYIRKIXELMP

SEQ ID NO: 973 - protein, 19 aa, Artificial Sequence
  Synthetic
LLQKIKTCWNKILRGSKEH

SEQ ID NO: 974 - protein, 23 aa, Artificial Sequence
  Synthetic
FLKRLLQKIKTCWNKILMGTKEH

SEQ ID NO: 975 - protein, 12 aa, Artificial Sequence
  Synthetic
EVFNKLKSLLEK

SEQ ID NO: 976 - protein, 12 aa, Artificial Sequence
  Synthetic
WLKLGKAVIDAL

SEQ ID NO: 977 - protein, 18 aa, Artificial Sequence
  Synthetic
GRHLLNELKKWPRWQPKP

SEQ ID NO: 978 - protein, 13 aa, Artificial Sequence
  Synthetic
LKAIAALAKKLLG

SEQ ID NO: 979 - protein, 21 aa, Artificial Sequence
  Synthetic
YNILECFYKCLDLVKKVLISH

SEQ ID NO: 980 - protein, 30 aa, Artificial Sequence
  Synthetic
RALLDKLKSLGKVVGKVALGVVQNYLNPRQ

SEQ ID NO: 981 - protein, 15 aa, Artificial Sequence
  Synthetic
LYQLVQTWPNWVKSP

SEQ ID NO: 982 - protein, 28 aa, Artificial Sequence
  Synthetic
ALWKNMLKGIGKLAGQAALGAVKTLVGA

SEQ ID NO: 983 - protein, 28 aa, Artificial Sequence
  Synthetic
ALWKNMLKGIGKLAGQAALGAVKTLVGA

SEQ ID NO: 984 - protein, 34 aa, Artificial Sequence
  Synthetic
RGILDTLKNLAKTAGKGILKSLVNTASCKLSGQC

SEQ ID NO: 985 - protein, 11 aa, Artificial Sequence
  Synthetic
VDEATRLMAQL

SEQ ID NO: 986 - protein, 20 aa, Artificial Sequence
  Synthetic
KWVDEVCRSLKKYICEFIIP

SEQ ID NO: 987 - protein, 20 aa, Artificial Sequence
  Synthetic
LKEALSRFKSWLKRTFGKKE

SEQ ID NO: 988 - protein, 20 aa, Artificial Sequence
  Synthetic
LKEALSRFKSWLKRTFGKKE

SEQ ID NO: 989 - protein, 20 aa, Artificial Sequence
  Synthetic
LKEALSRFKSWLKRTFGKKE

SEQ ID NO: 990 - protein, 13 aa, Artificial Sequence
  Synthetic
FISAIASMLGKFL

SEQ ID NO: 991 - protein, 19 aa, Artificial Sequence
  Synthetic
EVIKKFTKAMEKMKKNGRA

SEQ ID NO: 992 - protein, 19 aa, Artificial Sequence
  Synthetic
EVIKKFTKAMEKMKKNGRA

SEQ ID NO: 993 - protein, 19 aa, Artificial Sequence
  Synthetic
EVIKKFTKAMEKMKKNGRA

SEQ ID NO: 994 - protein, 19 aa, Artificial Sequence
  Synthetic
LLQKIKTCWNKILRGSKEH

SEQ ID NO: 995 - protein, 25 aa, Artificial Sequence
  Synthetic
LKKIDEVLEKLGKLFIQSGKIKNAF

SEQ ID NO: 996 - protein, 12 aa, Artificial Sequence
  Synthetic
IIKKVASVIGGL

SEQ ID NO: 997 - protein, 23 aa, Artificial Sequence
  Synthetic
FLKRLLQKIKTCWNKILMGTKEH

SEQ ID NO: 998 - protein, 23 aa, Artificial Sequence
  Synthetic
EVTRLAKDLLQQLRKGVRQGKFQ

SEQ ID NO: 999 - protein, 11 aa, Artificial Sequence
  Synthetic
FEKLFANMPDY

SEQ ID NO: 1000 - protein, 14 aa, Artificial Sequence
  Synthetic
FADLFGKVANLIKS

SEQ ID NO: 1001 - protein, 17 aa, Artificial Sequence
  Synthetic
FIEKLMTFIRKALKNAR

SEQ ID NO: 1002 - protein, 20 aa, Artificial Sequence
  Synthetic
LKEALSRFKSWLKRTFGKKE

SEQ ID NO: 1003 - protein, 13 aa, Artificial Sequence
  Synthetic
FLSAIASMLGKFL

SEQ ID NO: 1004 - protein, 17 aa, Artificial Sequence
  Synthetic
LFDIIKSAISIIVKAVE

SEQ ID NO: 1005 - protein, 19 aa, Artificial Sequence
  Synthetic
LLQKIKTCWNKILRGAKEY

SEQ ID NO: 1006 - protein, 19 aa, Artificial Sequence
  Synthetic
LLQKIKTCWNKILRDAKEH

SEQ ID NO: 1007 - protein, 34 aa, Artificial Sequence
  Synthetic
LFSFIHSFIRSALSFLTQTEENSIAARLYATAFQ

SEQ ID NO: 1008 - protein, 23 aa, Artificial Sequence
  Synthetic
FLKRLLQKIKTCWNKILMGTKEH

SEQ ID NO: 1009 - protein, 23 aa, Artificial Sequence
  Synthetic
FLKRLLQKIKTCWNKILMGTKEH

SEQ ID NO: 1010 - protein, 23 aa, Artificial Sequence
  Synthetic
FLKRLLQKIKTCWNKILMGTKEH

SEQ ID NO: 1011 - protein, 17 aa, Artificial Sequence
  Synthetic
RCVNNFDDVFNSVFRKL

SEQ ID NO: 1012 - protein, 12 aa, Artificial Sequence
  Synthetic
VGNFVHGFSHVF

SEQ ID NO: 1013 - protein, 23 aa, Artificial Sequence
  Synthetic
FLKRLLQKIKTCWNKILMGTKEH

SEQ ID NO: 1014 - protein, 25 aa, Artificial Sequence
  Synthetic
ARLTKLAEQLMEKIKNLCYTKVLGY

SEQ ID NO: 1015 - protein, 11 aa, Artificial Sequence
  Synthetic
LERLFAEMPDY

SEQ ID NO: 1016 - protein, 11 aa, Artificial Sequence
  Synthetic
LERLFAEMPDY

SEQ ID NO: 1017 - protein, 17 aa, Artificial Sequence
  Synthetic
EQLIEKIKNLWTRVRGY

SEQ ID NO: 1018 - protein, 34 aa, Artificial Sequence
  Synthetic
FGTILKALAKIAAKAVKKLATKPGATYMLKQNLE

SEQ ID NO: 1019 - protein, 25 aa, Artificial Sequence
  Synthetic
FFTELGASIASIFTNWFKSSTEPSH

SEQ ID NO: 1020 - protein, 23 aa, Artificial Sequence
  Synthetic
SLISSIADDIDHAWNKLLGRHRK

SEQ ID NO: 1021 - protein, 12 aa, Artificial Sequence
  Synthetic
YQKVWSKITKWG

SEQ ID NO: 1022 - protein, 11 aa, Artificial Sequence
  Synthetic
LEKLFANMPDY

SEQ ID NO: 1023 - protein, 19 aa, Artificial Sequence
  Synthetic
EFLNSFSKLMQKVIKIHQS

SEQ ID NO: 1024 - protein, 40 aa, Artificial Sequence
  Synthetic
YREGGECLQRCIGLFHKIGTCNFRFKCCKFQIPEKKTKIL

SEQ ID NO: 1025 - protein, 16 aa, Artificial Sequence
  Synthetic
MGKFARKFCQFMCGIC

SEQ ID NO: 1026 - protein, 16 aa, Artificial Sequence
  Synthetic
MGKFARKFCQFMCGIC

SEQ ID NO: 1027 - protein, 13 aa, Artificial Sequence
  Synthetic
SADKFWRRFARRR

SEQ ID NO: 1028 - protein, 11 aa, Artificial Sequence
  Synthetic
CSDLCQDVDDA

SEQ ID NO: 1029 - protein, 41 aa, Artificial Sequence
  Synthetic
IKDAVKKIADEVPDDVKKNAKDIAVKIAKSVTKSIFKYFLN

SEQ ID NO: 1030 - protein, 12 aa, Artificial Sequence
  Synthetic
IMGLIKKVAGAL

SEQ ID NO: 1031 - protein, 35 aa, Artificial Sequence
  Synthetic
IGASVRKICEKCRLIRRRGRIIVICSNPRHKQRQG

SEQ ID NO: 1032 - protein, 16 aa, Artificial Sequence
  Synthetic
KIKTCWNKILRGAKEY

SEQ ID NO: 1033 - protein, 20 aa, Artificial Sequence
  Synthetic
EVAQFVKDLLKHLRMIFRHG

SEQ ID NO: 1034 - protein, 30 aa, Artificial Sequence
  Synthetic
RALLDKLKSLGKVVGKVALGVAQHYLNPQQ

SEQ ID NO: 1035 - protein, 30 aa, Artificial Sequence
  Synthetic
RALLDKLKSLGKVVGKVAIGVAQHYLNPQQ

SEQ ID NO: 1036 - protein, 29 aa, Artificial Sequence
  Synthetic
RALLDKLKSLGKVVGKVAIGVAQHYLNPQ

SEQ ID NO: 1037 - protein, 17 aa, Artificial Sequence
  Synthetic
FINKLMTFIRKALKPTR

SEQ ID NO: 1038 - protein, 12 aa, Artificial Sequence
  Synthetic
VMGIIKKIAGAL

SEQ ID NO: 1039 - protein, 17 aa, Artificial Sequence
  Synthetic
DFLERLKKIMKEKYSKC

SEQ ID NO: 1040 - protein, 15 aa, Artificial Sequence
  Synthetic
EMKNAMKKLWTRVRK

SEQ ID NO: 1041 - protein, 15 aa, Artificial Sequence
  Synthetic
CEKAVHDLWHIIKKF

SEQ ID NO: 1042 - protein, 37 aa, Artificial Sequence
  Synthetic
GNFFKDLEKMGQRVRDAVISAAPAVDTLAKAKALGQG

SEQ ID NO: 1043 - protein, 24 aa, Artificial Sequence
  Synthetic
LVSSIGRALGGLLADVVKSKGQPA

SEQ ID NO: 1044 - protein, 23 aa, Artificial Sequence
  Synthetic
LVSSIGRALGGLLADVVKSKQPA

SEQ ID NO: 1045 - protein, 24 aa, Artificial Sequence
  Synthetic
LVSSIGRALGGLLADVVKSKGQPA

SEQ ID NO: 1046 - protein, 23 aa, Artificial Sequence
  Synthetic
FLKRLLQKIKTCWNKILMGTKEH

SEQ ID NO: 1047 - protein, 17 aa, Artificial Sequence
  Synthetic
LFDIIKTAISIIVKAVE

SEQ ID NO: 1048 - protein, 27 aa, Artificial Sequence
  Synthetic
DFIKACGRELVRVWVEICGSVSWGRTA

SEQ ID NO: 1049 - protein, 36 aa, Artificial Sequence
  Synthetic
NIFKEIERAVARTRDAVISAGPAVRTVAAATSVASG

SEQ ID NO: 1050 - protein, 19 aa, Artificial Sequence
  Synthetic
GLVDVLGKVGGLIKKLLPG

SEQ ID NO: 1051 - protein, 23 aa, Artificial Sequence
  Synthetic
FLDKLKKGASDFANALVNSIKGT

SEQ ID NO: 1052 - protein, 30 aa, Artificial Sequence
  Synthetic
RALWKNMLKGIGKLAGQAALGAVKTLVGAE

SEQ ID NO: 1053 - protein, 21 aa, Artificial Sequence
  Synthetic
LIRGAIHAGKAIHGLIHRRRH

SEQ ID NO: 1054 - protein, 34 aa, Artificial Sequence
  Synthetic
SIAKLMEEFMEKVFNFGKSEALKMGSAPTPAPKN

SEQ ID NO: 1055 - protein, 15 aa, Artificial Sequence
  Synthetic
LWDKFQKFLKKVIRI

SEQ ID NO: 1056 - protein, 23 aa, Artificial Sequence
  Synthetic
EVTRLAKDLLQQLRKGVRQGKFE

SEQ ID NO: 1057 - protein, 32 aa, Artificial Sequence
  Synthetic
LKSFMERIINEIDRFGIKIKRNFSRLLYSSKN

SEQ ID NO: 1058 - protein, 21 aa, Artificial Sequence
  Synthetic
STLRDFLERLKKIMKEKYSKC

SEQ ID NO: 1059 - protein, 21 aa, Artificial Sequence
  Synthetic
STLRDFLERLKKIMKEKYSKC

SEQ ID NO: 1060 - protein, 21 aa, Artificial Sequence
  Synthetic
STLRDFLERLKKIMKEKYSKC

SEQ ID NO: 1061 - protein, 28 aa, Artificial Sequence
  Synthetic
FLKGVGKALAGVGKMVADQFGNLLQAGQ

SEQ ID NO: 1062 - protein, 28 aa, Artificial Sequence
  Synthetic
FLKGVGKALAGVGKVVADQFGNLLQAGQ

SEQ ID NO: 1063 - protein, 23 aa, Artificial Sequence
  Synthetic
EVAQFVQTLLRYLQSLYRHGNFN

SEQ ID NO: 1064 - protein, 30 aa, Artificial Sequence
  Synthetic
ALWKNMLKGIGKLAGQAALGAVKTLVGAES

SEQ ID NO: 1065 - protein, 41 aa, Artificial Sequence
  Synthetic
GACKKIMRTCLRLISRDILAGKKPQEVCVDIKLCKHKAGLI

SEQ ID NO: 1066 - protein, 24 aa, Artificial Sequence
  Synthetic
FWGALIKGAAKLIPSVVGLFKKKQ

SEQ ID NO: 1067 - protein, 13 aa, Artificial Sequence
  Synthetic
IIGAIPQVIGAIR

SEQ ID NO: 1068 - protein, 13 aa, Artificial Sequence
  Synthetic
IIGAIPQVIGAIR

SEQ ID NO: 1069 - protein, 23 aa, Artificial Sequence
  Synthetic
FLKRLLQKIKTCWNKILMGTKEH

SEQ ID NO: 1070 - protein, 19 aa, Artificial Sequence
  Synthetic
GFFDLAKKVVGGIRNALGI

SEQ ID NO: 1071 - protein, 21 aa, Artificial Sequence
  Synthetic
LKDFLENLKRIMQKRYSKCRR

SEQ ID NO: 1072 - protein, 11 aa, Artificial Sequence
  Synthetic
AHQVLANLLKM

SEQ ID NO: 1073 - protein, 36 aa, Artificial Sequence
  Synthetic
RYLATFLQPLSQKWIAFLLKKIFSKRSSIRKTLPFS

SEQ ID NO: 1074 - protein, 15 aa, Artificial Sequence
  Synthetic
LFDVIKKVASVIGGL

SEQ ID NO: 1075 - protein, 39 aa, Artificial Sequence
  Synthetic
RDLKKILNDWDENCEGCLEKSDFIKRIEELKPKYTRSEL

SEQ ID NO: 1076 - protein, 19 aa, Artificial Sequence
  Synthetic
GIVDFAKKVVGGIRNALGI

SEQ ID NO: 1077 - protein, 26 aa, Artificial Sequence
  Synthetic
IFYRLDRICEDCYSLFREPQILSFCK

SEQ ID NO: 1078 - protein, 35 aa, Artificial Sequence
  Synthetic
DLLRRLKKLLDEVDTEHETNDFLEDFFDLIFFKKI

SEQ ID NO: 1079 - protein, 23 aa, Artificial Sequence
  Synthetic
FLKRLLQEIKTCWNKILMGTKEH

SEQ ID NO: 1080 - protein, 23 aa, Artificial Sequence
  Synthetic
FLKRLLQEIKTCWNKILMGTKEH

SEQ ID NO: 1081 - protein, 23 aa, Artificial Sequence
  Synthetic
FLKRLLQEIKTCWNKILMGTKEH

SEQ ID NO: 1082 - protein, 23 aa, Artificial Sequence
  Synthetic
FLKRLLQEIKTCWNKILMGTKEH

SEQ ID NO: 1083 - protein, 23 aa, Artificial Sequence
  Synthetic
FLKRLLQEIKTCWNKILMGTKEH

SEQ ID NO: 1084 - protein, 23 aa, Artificial Sequence
  Synthetic
FLKRLLQEIKTCWNKILMGTKEH

SEQ ID NO: 1085 - protein, 19 aa, Artificial Sequence
  Synthetic
GFVDLAKKVVGGIRNALGI

SEQ ID NO: 1086 - protein, 17 aa, Artificial Sequence
  Synthetic
LSDIIKTAISIIVKAVE

SEQ ID NO: 1087 - protein, 21 aa, Artificial Sequence
  Synthetic
LIKGAIHAGKAIHGLIHRRRH

SEQ ID NO: 1088 - protein, 25 aa, Artificial Sequence
  Synthetic
SILRGLKKLGKMGQAFVNCEIYKKC

SEQ ID NO: 1089 - protein, 15 aa, Artificial Sequence
  Synthetic
LFDIVKKVVGAIGSL

SEQ ID NO: 1090 - protein, 24 aa, Artificial Sequence
  Synthetic
SLFQMINEFFTSIGTTIKDLFTFR

SEQ ID NO: 1091 - protein, 15 aa, Artificial Sequence
  Synthetic
LLDIVKKVVGAFGSL

SEQ ID NO: 1092 - protein, 15 aa, Artificial Sequence
  Synthetic
LLDIVKKVVGAFGSL

SEQ ID NO: 1093 - protein, 15 aa, Artificial Sequence
  Synthetic
LFDIVKKVVGAFGSL

SEQ ID NO: 1094 - protein, 15 aa, Artificial Sequence
  Synthetic
LFDIVKKVVGAFGSL

SEQ ID NO: 1095 - protein, 27 aa, Artificial Sequence
  Synthetic
GMWGSLLKGVATVVKHVLPHALSSQQS

SEQ ID NO: 1096 - protein, 26 aa, Artificial Sequence
  Synthetic
NMARKCRECCGGIGKCFGPQCLCNRI

SEQ ID NO: 1097 - protein, 39 aa, Artificial Sequence
  Synthetic
IFGSLFSLGSKLLPTVFKLFSRKKQRALMKRDLEDIMDP

SEQ ID NO: 1098 - protein, 12 aa, Artificial Sequence
  Synthetic
ILGLLGKALSHL

SEQ ID NO: 1099 - protein, 13 aa, Artificial Sequence
  Synthetic
LIGAIPQVIGAIR

SEQ ID NO: 1100 - protein, 19 aa, Artificial Sequence
  Synthetic
SLVKLVSTLLSLVPSLMKG

SEQ ID NO: 1101 - protein, 11 aa, Artificial Sequence
  Synthetic
AMRKYLDSILN

SEQ ID NO: 1102 - protein, 19 aa, Artificial Sequence
  Synthetic
GILDVAKTLVGKLRNVLGI

SEQ ID NO: 1103 - protein, 30 aa, Artificial Sequence
  Synthetic
DCYRRFEKGVEKGQKCWCIPTGLKYSKKKE

SEQ ID NO: 1104 - protein, 20 aa, Artificial Sequence
  Synthetic
KEFLERLKSLIQRMIHQHLS

SEQ ID NO: 1105 - protein, 38 aa, Artificial Sequence
  Synthetic
LKEFGNNLKDAFESIPEATRKLMTSFAEGLKNLRLPLL

SEQ ID NO: 1106 - protein, 17 aa, Artificial Sequence
  Synthetic
FLNRWITFCQSIISTLT

SEQ ID NO: 1107 - protein, 13 aa, Artificial Sequence
  Synthetic
CVRFVKKVVEKVG

SEQ ID NO: 1108 - protein, 36 aa, Artificial Sequence
  Synthetic
KAINELIKVMNDLLPKSNLRKRKRSQNLFRGRRAST

SEQ ID NO: 1109 - protein, 26 aa, Artificial Sequence
  Synthetic
IGAVLKVLTTGLPALISWIKRKRQQG

SEQ ID NO: 1110 - protein, 26 aa, Artificial Sequence
  Synthetic
IGAVLKVLTTGLPALISWIKRKRQQG

SEQ ID NO: 1111 - protein, 26 aa, Artificial Sequence
  Synthetic
IGAVLKVLTTGLPALISWIKRKRQQG

SEQ ID NO: 1112 - protein, 26 aa, Artificial Sequence
  Synthetic
IGAVLKVLTTGLPALISWIKRKRQQG

SEQ ID NO: 1113 - protein, 26 aa, Artificial Sequence
  Synthetic
IGAVLKVLTTGLPALISWIKRKRQQG

SEQ ID NO: 1114 - protein, 14 aa, Artificial Sequence
  Synthetic
WVQKYIEYLDQMSK

SEQ ID NO: 1115 - protein, 25 aa, Artificial Sequence
  Synthetic
ERCCKNGKRGCGRWCRDHSRCCGRR

SEQ ID NO: 1116 - protein, 12 aa, Artificial Sequence
  Synthetic
IIKKVASVVGGL

SEQ ID NO: 1117 - protein, 26 aa, Artificial Sequence
  Synthetic
IGAVLKVLATGLPALISWIKRKRQQG

SEQ ID NO: 1118 - protein, 36 aa, Artificial Sequence
  Synthetic
ILDSFKQFAKGVGKDLIKGAAQGVLSTMSCKLAKTC

SEQ ID NO: 1119 - protein, 18 aa, Artificial Sequence
  Synthetic
FIKKLMTFIRKVLKTPRL

SEQ ID NO: 1120 - protein, 19 aa, Artificial Sequence
  Synthetic
REFVKQLESLLQKVTGYYE

SEQ ID NO: 1121 - protein, 24 aa, Artificial Sequence
  Synthetic
RLTKLAEQLMEKIKNLCYTKVLGY

SEQ ID NO: 1122 - protein, 15 aa, Artificial Sequence
  Synthetic
LFDIVKKVVGALGSL

SEQ ID NO: 1123 - protein, 21 aa, Artificial Sequence
  Synthetic
QVLHQVQKLANELLRKLWSSG

SEQ ID NO: 1124 - protein, 11 aa, Artificial Sequence
  Synthetic
AVKKYINSLLA

SEQ ID NO: 1125 - protein, 24 aa, Artificial Sequence
  Synthetic
LVSSIGKALGGLLADVVKSKGQPA

SEQ ID NO: 1126 - protein, 24 aa, Artificial Sequence
  Synthetic
LVSSIGKALGGLLADVVKSKGQPA

SEQ ID NO: 1127 - protein, 30 aa, Artificial Sequence
  Synthetic
RWIAFCHNILSCCKNMTRFQPPQAKDPWVH

SEQ ID NO: 1128 - protein, 30 aa, Artificial Sequence
  Synthetic
RWIAFCHNILSCCKNMTRFQPLQAKDPWVH

SEQ ID NO: 1129 - protein, 20 aa, Artificial Sequence
  Synthetic
TQAWTNFKKWFKKWFKETFS

SEQ ID NO: 1130 - protein, 20 aa, Artificial Sequence
  Synthetic
TQAWTNFKKWFKKWFKETFS

SEQ ID NO: 1131 - protein, 39 aa, Artificial Sequence
  Synthetic
DCTACLSNLVNRIFSICNNAIGARVQLVDCFIQYEQRSF

SEQ ID NO: 1132 - protein, 23 aa, Artificial Sequence
  Synthetic
AVRRLLTAVQNIVDDVRNSKASC

SEQ ID NO: 1133 - protein, 25 aa, Artificial Sequence
  Synthetic
IGAILKVLATGLPTLISWIKNKRKQ

SEQ ID NO: 1134 - protein, 25 aa, Artificial Sequence
  Synthetic
SILRGLKKLGNMGQAFVNCKIYKKC

SEQ ID NO: 1135 - protein, 26 aa, Artificial Sequence
  Synthetic
IGAVLKVLTTGLPALIGWIKRKRQQG

SEQ ID NO: 1136 - protein, 15 aa, Artificial Sequence
  Synthetic
QELFSLLKRLINKVN

SEQ ID NO: 1137 - protein, 19 aa, Artificial Sequence
  Synthetic
GIVDFAKGVLGKIKNVLGI

SEQ ID NO: 1138 - protein, 34 aa, Artificial Sequence
  Synthetic
LSNLVNRIFSICNNAIGARVQLVDCFIQYEQRSF

SEQ ID NO: 1139 - protein, 34 aa, Artificial Sequence; identical to SEQ ID NO: 1138
  Synthetic

SEQ ID NO: 1140 - protein, 23 aa, Artificial Sequence
  Synthetic
RTLKDFLERLKTIMQEKYSKGGS

SEQ ID NO: 1141 - protein, 15 aa, Artificial Sequence
  Synthetic
LFDIVKKVVGTIAGL

SEQ ID NO: 1142 - protein, 26 aa, Artificial Sequence
  Synthetic
GLFGKLIKKFGRKAISYAVKKARGKH

SEQ ID NO: 1143 - protein, 26 aa, Artificial Sequence
  Synthetic
GLFGKLIKKFGRKAISYAVKKARGKN

SEQ ID NO: 1144 - protein, 15 aa, Artificial Sequence
  Synthetic
QAIRCMQSLFRTVKR

SEQ ID NO: 1145 - protein, 20 aa, Artificial Sequence
  Synthetic
IGKCWHDIMECWQHCHGRKV

SEQ ID NO: 1146 - protein, 20 aa, Artificial Sequence
  Synthetic
KKWVQDAKKYLDQISQTTKP

SEQ ID NO: 1147 - protein, 34 aa, Artificial Sequence; identical to SEQ ID NO: 1138
  Synthetic

SEQ ID NO: 1148 - protein, 28 aa, Artificial Sequence
  Synthetic
KYWTECCGRIGPHCSRCICPGVVCPKRG

SEQ ID NO: 1149 - protein, 13 aa, Artificial Sequence
  Synthetic
FFRVLAKLGKLAK

SEQ ID NO: 1150 - protein, 20 aa, Artificial Sequence
  Synthetic
KEFLERLKSLIQKMIHQHLS

SEQ ID NO: 1151 - protein, 26 aa, Artificial Sequence
  Synthetic
GLWKNMLSGIGKLAGQAALGAVKTLV

SEQ ID NO: 1152 - protein, 14 aa, Artificial Sequence
  Synthetic
CCNFLGKCCHLVKG

SEQ ID NO: 1153 - protein, 31 aa, Artificial Sequence
  Synthetic
ALWKTLLKKVGKVAGKAVLNAVTNMANQNEQ

SEQ ID NO: 1154 - protein, 15 aa, Artificial Sequence
  Synthetic
EDIASDLKSMLQDLE

SEQ ID NO: 1155 - protein, 15 aa, Artificial Sequence
  Synthetic
VQSCADSCSKMCTKI

SEQ ID NO: 1156 - protein, 12 aa, Artificial Sequence
  Synthetic
VKTVCKKVLKQG

SEQ ID NO: 1157 - protein, 15 aa, Artificial Sequence
  Synthetic
DKAKKFGGKIKKWFG

SEQ ID NO: 1158 - protein, 23 aa, Artificial Sequence
  Synthetic
EKLKKIGQKIQGFVPKLAPRTDY

SEQ ID NO: 1159 - protein, 29 aa, Artificial Sequence
  Synthetic
KLCRNVGGKLKKVLHFIQKSVSKIKSCKK

SEQ ID NO: 1160 - protein, 25 aa, Artificial Sequence
  Synthetic
IGAILKVLSTGLPALISWIKRKRQE

SEQ ID NO: 1161 - protein, 29 aa, Artificial Sequence
  Synthetic
RGIMDTVKNVAKNLAGQLLDKLKCKITAC

SEQ ID NO: 1162 - protein, 42 aa, Artificial Sequence
  Synthetic
KKILDDWGEMCKGCAEKSDYIRKINELMPKYAPKAASARTDL

SEQ ID NO: 1163 - protein, 30 aa, Artificial Sequence
  Synthetic
TWISFCHNILSCCKSMTKFLPPQAKEPWSK

SEQ ID NO: 1164 - protein, 21 aa, Artificial Sequence
  Synthetic
NLIRAAERIFKDCMHLWNCGK

SEQ ID NO: 1165 - protein, 15 aa, Artificial Sequence
  Synthetic
VYEIIKTWDHWAESP

SEQ ID NO: 1166 - protein, 20 aa, Artificial Sequence
  Synthetic
KEFLERLKSLLQKMVHQHLP

SEQ ID NO: 1167 - protein, 22 aa, Artificial Sequence
  Synthetic
KQFLDYLQEFLAVINTEWTIEG

SEQ ID NO: 1168 - protein, 41 aa, Artificial Sequence
  Synthetic
KILDDWGETCKGCAEKSDYIRKINELMPKYAPKAASSRTDL

SEQ ID NO: 1169 - protein, 39 aa, Artificial Sequence
  Synthetic
DFLKELEGVGQRVRDSIISAGPAIDVLKKSQGPRRWSRP

SEQ ID NO: 1170 - protein, 33 aa, Artificial Sequence
  Synthetic
LLQRIQSWWKNLFQHGASSSTRRLRQLTNGEKK

SEQ ID NO: 1171 - protein, 29 aa, Artificial Sequence
  Synthetic
KEFLERFKSLLQKMIHQHLSSRTHGSEDS

SEQ ID NO: 1172 - protein, 29 aa, Artificial Sequence
  Synthetic
KEFLERFKSLLQKMIHQHLSSRTHGSEDS

SEQ ID NO: 1173 - protein, 29 aa, Artificial Sequence
  Synthetic
KEFLERFKSLLQKMIHQHLSSRTHGSEDS

SEQ ID NO: 1174 - protein, 29 aa, Artificial Sequence
  Synthetic
KEFLERFKSLLQKMIHQHLSSRTHGSEDS

SEQ ID NO: 1175 - protein, 29 aa, Artificial Sequence
  Synthetic
KEFLERFKSLLQKMIHQHLSSRTHGSEDS

SEQ ID NO: 1176 - protein, 29 aa, Artificial Sequence
  Synthetic
KEFLERFKSLLQKMIHQHLSSRTHGSEDS

SEQ ID NO: 1177 - protein, 12 aa, Artificial Sequence
  Synthetic
SGLGCWRRIVDS

SEQ ID NO: 1178 - protein, 20 aa, Artificial Sequence
  Synthetic
KEFLERLKSLIQKMIHQHLS

SEQ ID NO: 1179 - protein, 20 aa, Artificial Sequence
  Synthetic
KEFLERLKSLIQKMIHQHLS

SEQ ID NO: 1180 - protein, 12 aa, Artificial Sequence
  Synthetic
EEYQALVQTVGK

SEQ ID NO: 1181 - protein, 26 aa, Artificial Sequence
  Synthetic
RTLKDFLERLKTIMQEKYSKGGSWIF

SEQ ID NO: 1182 - protein, 13 aa, Artificial Sequence
  Synthetic
KLIKTVASAIANQ

SEQ ID NO: 1183 - protein, 20 aa, Artificial Sequence
  Synthetic
DRLKQFMQKLIDNLDQLKSC

SEQ ID NO: 1184 - protein, 11 aa, Artificial Sequence
  Synthetic
GLLKGISALLS

SEQ ID NO: 1185 - protein, 28 aa, Artificial Sequence
  Synthetic
IFDKLKNFAKGVAQSLLNKASCKLSGQC

SEQ ID NO: 1186 - protein, 20 aa, Artificial Sequence
  Synthetic
TQAWTNFKKWFKNWFKKTFS

SEQ ID NO: 1187 - protein, 16 aa, Artificial Sequence
  Synthetic
LGSLLKTGLKVGSNLL

SEQ ID NO: 1188 - protein, 29 aa, Artificial Sequence
  Synthetic
FRKLFRVYSNFLRGKLKLYTGEACRTGDR

SEQ ID NO: 1189 - protein, 25 aa, Artificial Sequence
  Synthetic
LIGSIGKALGGLLVDVLKPKLQAAS

SEQ ID NO: 1190 - protein, 30 aa, Artificial Sequence
  Synthetic
DCYRRFEKGVEKGQKCWCIPTGLRYSKEKE

SEQ ID NO: 1191 - protein, 30 aa, Artificial Sequence; identical to SEQ ID NO: 1190
  Synthetic

SEQ ID NO: 1192 - protein, 30 aa, Artificial Sequence; identical to SEQ ID NO: 1190
  Synthetic

SEQ ID NO: 1193 - protein, 30 aa, Artificial Sequence; identical to SEQ ID NO: 1190
  Synthetic

SEQ ID NO: 1194 - protein, 30 aa, Artificial Sequence; identical to SEQ ID NO: 1190
  Synthetic

SEQ ID NO: 1195 - protein, 30 aa, Artificial Sequence; identical to SEQ ID NO: 1190
  Synthetic

SEQ ID NO: 1196 - protein, 16 aa, Artificial Sequence
  Synthetic
LFDIVKKIAGHIASSI

SEQ ID NO: 1197 - protein, 16 aa, Artificial Sequence
  Synthetic
LFDIVKKIAGHIASSI

SEQ ID NO: 1198 - protein, 16 aa, Artificial Sequence
  Synthetic
DCMRTCGGAIGPWENL

SEQ ID NO: 1199 - protein, 23 aa, Artificial Sequence
  Synthetic
IKDWIKGAAKKLIKTVASHIANQ

SEQ ID NO: 1200 - protein, 24 aa, Artificial Sequence
  Synthetic
LLKELWTKIKGAGKAVLGKIKGLL

SEQ ID NO: 1201 - protein, 13 aa, Artificial Sequence
  Synthetic
MEKAADKIKNLFG

SEQ ID NO: 1202 - protein, 19 aa, Artificial Sequence
  Synthetic
LLEKIKTCWNKILSGTKEH

SEQ ID NO: 1203 - protein, 20 aa, Artificial Sequence
  Synthetic
ATKFIEKLMTFIRRASKNAR

SEQ ID NO: 1204 - protein, 29 aa, Artificial Sequence
  Synthetic
CRKVVKYWTHCCQEGLRCTWERGVPKCEP

SEQ ID NO: 1205 - protein, 26 aa, Artificial Sequence
  Synthetic
FWGHIWNAVKRVGANALHGAVTGALS

SEQ ID NO: 1206 - protein, 22 aa, Artificial Sequence
  Synthetic
ETIVEFLNKWITFCQSIISTLT

SEQ ID NO: 1207 - protein, 22 aa, Artificial Sequence
  Synthetic
ETIVEFLNKWITFCQSIISTLT

SEQ ID NO: 1208 - protein, 16 aa, Artificial Sequence
  Synthetic
LFDIVKKIAGHIAGSI

SEQ ID NO: 1209 - protein, 16 aa, Artificial Sequence
  Synthetic
LFDIVKKIAGHIAGSI

SEQ ID NO: 1210 - protein, 28 aa, Artificial Sequence
  Synthetic
FLDKLKNFAKGVAQSLLNKASCKLSGQC

SEQ ID NO: 1211 - protein, 24 aa, Artificial Sequence
  Synthetic
GFKDWIKGAAKKLIKTVAANIANQ

SEQ ID NO: 1212 - protein, 13 aa, Artificial Sequence
  Synthetic
RVVEKFLKRAENS

SEQ ID NO: 1213 - protein, 36 aa, Artificial Sequence
  Synthetic
FSSIFRGVAKFASKGLGKDLARLGVNLVACKISKQC

SEQ ID NO: 1214 - protein, 29 aa, Artificial Sequence
  Synthetic
NMFSDVADELRRLVIVFDCRSVSIQQLLR

SEQ ID NO: 1215 - protein, 32 aa, Artificial Sequence
  Synthetic
WYQLIRTFGNLIHQKYRKLLEAYRKLRDIFSG

SEQ ID NO: 1216 - protein, 27 aa, Artificial Sequence
  Synthetic
ENLTQFFSSLESLIQKSITRLSLNKKR

SEQ ID NO: 1217 - protein, 13 aa, Artificial Sequence
  Synthetic
KYATNCAKTCGKC

SEQ ID NO: 1218 - protein, 15 aa, Artificial Sequence
  Synthetic
VQSCVDSCSKMCTKI

SEQ ID NO: 1219 - protein, 15 aa, Artificial Sequence
  Synthetic
VQSCVDSCSKMCTKI

SEQ ID NO: 1220 - protein, 17 aa, Artificial Sequence
  Synthetic
FVDFLKKVAGTIANVVT

SEQ ID NO: 1221 - protein, 28 aa, Artificial Sequence
  Synthetic
ALWKDILKNVGKAAGKAVLNTVTDMVNQ

SEQ ID NO: 1222 - protein, 31 aa, Artificial Sequence
  Synthetic
ALWKDILKNVGKAAGKAVLNTVTDMVNQGEQ

SEQ ID NO: 1223 - protein, 13 aa, Artificial Sequence
  Synthetic
KYATNCAKTCGKC

SEQ ID NO: 1224 - protein, 16 aa, Artificial Sequence
  Synthetic
LFDIVKKIAGHIVSSI

SEQ ID NO: 1225 - protein, 32 aa, Artificial Sequence
  Synthetic
LGSFMKGVGKGLATVGKIVADQFGKLLEAGQG

SEQ ID NO: 1226 - protein, 32 aa, Artificial Sequence
  Synthetic
LGSFMKGVGKGLATVGKIVADQFGKLLEAGKG

SEQ ID NO: 1227 - protein, 41 aa, Artificial Sequence
  Synthetic
KILDDWGETCKGCAEKSDYIRKINELMPKYAPKAASARTDL

SEQ ID NO: 1228 - protein, 24 aa, Artificial Sequence
  Synthetic
VWSTVLGGLKKFAKGGLEAIVNPK

SEQ ID NO: 1229 - protein, 16 aa, Artificial Sequence
  Synthetic
VDEVFSEVVKIFDKEG

SEQ ID NO: 1230 - protein, 19 aa, Artificial Sequence
  Synthetic
SRCYRSLYKCVAVCNRLVH

SEQ ID NO: 1231 - protein, 29 aa, Artificial Sequence
  Synthetic
KEFLERFKSLLQKMIHRHLSSRTHGSEDS

SEQ ID NO: 1232 - protein, 13 aa, Artificial Sequence
  Synthetic
VGRVHRLLRKGNY

SEQ ID NO: 1233 - protein, 14 aa, Artificial Sequence
  Synthetic
LYSALYKCMSFLKK

SEQ ID NO: 1234 - protein, 11 aa, Artificial Sequence
  Synthetic
LENLFTHMPDY

SEQ ID NO: 1235 - protein, 21 aa, Artificial Sequence
  Synthetic
HSFYKCIDNLCKRFRRQKHLV

SEQ ID NO: 1236 - protein, 19 aa, Artificial Sequence
  Synthetic
NWFSEAFKKVKEHLKTAFS

SEQ ID NO: 1237 - protein, 23 aa, Artificial Sequence
  Synthetic
GFRDVLKGAAKAFVKTVAGHIAN

SEQ ID NO: 1238 - protein, 24 aa, Artificial Sequence
  Synthetic
GFRDVLKGAAKAFVKTVAGHIANI

SEQ ID NO: 1239 - protein, 31 aa, Artificial Sequence
  Synthetic
LRGFLKGVGTALAGVGKVVADQFDKLLQAGQ

SEQ ID NO: 1240 - protein, 17 aa, Artificial Sequence
  Synthetic
KWVKQVVHMLSQRVKRM

SEQ ID NO: 1241 - protein, 32 aa, Artificial Sequence
  Synthetic
EKAEKFFDRLNSLIQKVHLKSSICHLMSSLMF

SEQ ID NO: 1242 - protein, 15 aa, Artificial Sequence
  Synthetic
RVLKRLLAMLRQHAF

SEQ ID NO: 1243 - protein, 34 aa, Artificial Sequence
  Synthetic
RGIMDTLKNLAKTAGKGALQSLVKMASCKLSGQC

SEQ ID NO: 1244 - protein, 23 aa, Artificial Sequence
  Synthetic
KIMRKIMTNLSRLCPVHKRSKRY

SEQ ID NO: 1245 - protein, 13 aa, Artificial Sequence
  Synthetic
AKKFGGKIMKWFS

SEQ ID NO: 1246 - protein, 26 aa, Artificial Sequence
  Synthetic
ALWKNMLSGIGKLAGQAALGAVKTLV

SEQ ID NO: 1247 - protein, 30 aa, Artificial Sequence
  Synthetic
GWKDWLNKGKEWLKKKGPGIMKAALKAATQ

SEQ ID NO: 1248 - protein, 22 aa, Artificial Sequence
  Synthetic
INTLKKVIQGLHEVIKLVSNHE

SEQ ID NO: 1249 - protein, 14 aa, Artificial Sequence
  Synthetic
KGIIRTIKDWYKGK

SEQ ID NO: 1250 - protein, 40 aa, Artificial Sequence
  Synthetic
EKGMKALKNYANDVINGPAEAPAAAAAPEEPPVEQRRRRR

SEQ ID NO: 1251 - protein, 32 aa, Artificial Sequence
  Synthetic
GILDSFKGVAKGVAKDLAGKLLDKLKCKITGC

SEQ ID NO: 1252 - protein, 11 aa, Artificial Sequence
  Synthetic
AHQVLATLFRI

SEQ ID NO: 1253 - protein, 29 aa, Artificial Sequence
  Synthetic
GLWKSLLKNVGKAAGKAALNAVTDMVNQA

SEQ ID NO: 1254 - protein, 29 aa, Artificial Sequence
  Synthetic
GLWKSLLKNVGKAAGKAALNAVTDMVNQS

SEQ ID NO: 1255 - protein, 29 aa, Artificial Sequence
  Synthetic
RGLMDTVKNVAKNLAGHMLDKLKCKITGC

SEQ ID NO: 1256 - protein, 15 aa, Artificial Sequence
  Synthetic
LFDIAKKVIGVIGSL

SEQ ID NO: 1257 - protein, 29 aa, Artificial Sequence
  Synthetic
GMFTNMLKGIGKLAGQAALGAVKTLAGEQ

SEQ ID NO: 1258 - protein, 22 aa, Artificial Sequence
  Synthetic
DAIEYFWQRFDTFLNNINENNP

SEQ ID NO: 1259 - protein, 42 aa, Artificial Sequence
  Synthetic
CAGLYKKCGKGVNTCCENRPCKCDLAMGNCICKKKFVEFFGG

SEQ ID NO: 1260 - protein, 41 aa, Artificial Sequence
  Synthetic
EKGMKALKNYANDVLNGPAEAPAPAAAAPEEPPVEQRRRRR

SEQ ID NO: 1261 - protein, 12 aa, Artificial Sequence
  Synthetic
WKAIIEAAKQAL

SEQ ID NO: 1262 - protein, 15 aa, Artificial Sequence
  Synthetic
LLEKLAKKFKGCKNK

SEQ ID NO: 1263 - protein, 15 aa, Artificial Sequence
  Synthetic
YSRGCSRITRCRRDA

SEQ ID NO: 1264 - protein, 22 aa, Artificial Sequence
  Synthetic
CKKVARVLYHLFYGIVKSVCVG

SEQ ID NO: 1265 - protein, 35 aa, Artificial Sequence
  Synthetic
VAASVRKICEKCRLIRRRGRLLVICSNPKHKQRQG

SEQ ID NO: 1266 - protein, 20 aa, Artificial Sequence
  Synthetic
LERISSFASSFINDLQDRVL

SEQ ID NO: 1267 - protein, 42 aa, Artificial Sequence; identical to SEQ ID NO: 1162
  Synthetic

SEQ ID NO: 1268 - protein, 26 aa, Artificial Sequence
  Synthetic
TTLKDFLKSLKRIMQKKYWQCESSLF

SEQ ID NO: 1269 - protein, 22 aa, Artificial Sequence
  Synthetic
RKLYNIIRRWPEWLENVDSYKK

SEQ ID NO: 1270 - protein, 36 aa, Artificial Sequence
  Synthetic
ILSLFTGGIKALGKTLFKMAGKAGAEHLACKATNQC

SEQ ID NO: 1271 - protein, 14 aa, Artificial Sequence
  Synthetic
IAKAVLSVVGQLVG

SEQ ID NO: 1272 - protein, 21 aa, Artificial Sequence
  Synthetic
KCFQHLDDCCSRKCNRFNKCV

SEQ ID NO: 1273 - protein, 14 aa, Artificial Sequence
  Synthetic
LEKLAKKFKGCKNK

SEQ ID NO: 1274 - protein, 29 aa, Artificial Sequence
  Synthetic
KEFLERFKSLLQKMIHQHLSSRTHGSEDS

SEQ ID NO: 1275 - protein, 29 aa, Artificial Sequence
  Synthetic
KEFLERFKSLLQKMIHQHLSSRTHGSEDS

SEQ ID NO: 1276 - protein, 29 aa, Artificial Sequence
  Synthetic
KEFLERFKSLLQKMIHQHLSSRTHGSEDS

SEQ ID NO: 1277 - protein, 13 aa, Artificial Sequence
  Synthetic
MKHLDQIFQNLKP

SEQ ID NO: 1278 - protein, 13 aa, Artificial Sequence
  Synthetic
LLKIAAKVGSNLL

SEQ ID NO: 1279 - protein, 26 aa, Artificial Sequence
  Synthetic
GLWKNMLSGIGKLAGEAALGAVKTLV

SEQ ID NO: 1280 - protein, 19 aa, Artificial Sequence
  Synthetic
QKCVQQLESLLQKAISRLA

SEQ ID NO: 1281 - protein, 20 aa, Artificial Sequence
  Synthetic
REFLERMKSLLQKMIHQHLS

SEQ ID NO: 1282 - protein, 15 aa, Artificial Sequence
  Synthetic
QELFSLLKRLINKVN

SEQ ID NO: 1283 - protein, 17 aa, Artificial Sequence
  Synthetic
KKWVQKYISLLKTPKQL

SEQ ID NO: 1284 - protein, 13 aa, Artificial Sequence
  Synthetic
IVSGAVSLVKKLG

SEQ ID NO: 1285 - protein, 20 aa, Artificial Sequence
  Synthetic
KVFNNCHHFVYSLYNKIKQK

SEQ ID NO: 1286 - protein, 19 aa, Artificial Sequence
  Synthetic
REFLNNWITFCQSIFSTLP

SEQ ID NO: 1287 - protein, 19 aa, Artificial Sequence
  Synthetic
LLEKIKTCWNKILSGTKEH

SEQ ID NO: 1288 - protein, 35 aa, Artificial Sequence
  Synthetic
IAQLVKKWIKTVLEARSKFQASLNEYCRALTNNSA

SEQ ID NO: 1289 - protein, 25 aa, Artificial Sequence
  Synthetic
RFLGALFKVASKVLPSVFCAITKKC

SEQ ID NO: 1290 - protein, 15 aa, Artificial Sequence
  Synthetic
VKKIIEKMLKNGKSN

SEQ ID NO: 1291 - protein, 19 aa, Artificial Sequence
  Synthetic
LLQKIKTCWNKILRGAKEY

SEQ ID NO: 1292 - protein, 14 aa, Artificial Sequence
  Synthetic
AKKCCHKVHNCCSK

SEQ ID NO: 1293 - protein, 22 aa, Artificial Sequence
  Synthetic
RKLYNLIRRWPEWLENVDSYKQ

SEQ ID NO: 1294 - protein, 14 aa, Artificial Sequence
  Synthetic
SAGKAIHDLIRRRH

SEQ ID NO: 1295 - protein, 12 aa, Artificial Sequence
  Synthetic
EVLSKLKSLLQK

SEQ ID NO: 1296 - protein, 19 aa, Artificial Sequence
  Synthetic
KWVQDFMKHLDKKTQTPKL

SEQ ID NO: 1297 - protein, 13 aa, Artificial Sequence
  Synthetic
KTYTELFKEYFEK

SEQ ID NO: 1298 - protein, 13 aa, Artificial Sequence
  Synthetic
KTYTELFKEYFEK

SEQ ID NO: 1299 - protein, 42 aa, Artificial Sequence
  Synthetic
AVNELVGVMHRLSSNIRRKKKGSRCCFGGGDRLNQNYPARSI

SEQ ID NO: 1300 - protein, 23 aa, Artificial Sequence
  Synthetic
FKDWIKGAAKKLIKTVASSIANE

SEQ ID NO: 1301 - protein, 21 aa, Artificial Sequence
  Synthetic
STLKDLLERLKTIMKEKYSKC

SEQ ID NO: 1302 - protein, 25 aa, Artificial Sequence
  Synthetic
FFGSLLSLGSKLLPSVFKLFQRKKE

SEQ ID NO: 1303 - protein, 21 aa, Artificial Sequence
  Synthetic
LKDFLENLKRIMQKRYSKCRR

SEQ ID NO: 1304 - protein, 39 aa, Artificial Sequence
  Synthetic
QLQQVISRIYQTATHLPKVCNIPQVSVCPFQKTMPGPSY

SEQ ID NO: 1305 - protein, 20 aa, Artificial Sequence
  Synthetic
KEFLRSFEKLIQQVIRDDSS

SEQ ID NO: 1306 - protein, 19 aa, Artificial Sequence
  Synthetic
LLQKIKTCWNKILRGAKEY

SEQ ID NO: 1307 - protein, 19 aa, Artificial Sequence
  Synthetic
EKAADKAKKFGGKIKKWFG

SEQ ID NO: 1308 - protein, 21 aa, Artificial Sequence
  Synthetic
NKVFNNCHHFVYSLYNKIKQK

SEQ ID NO: 1309 - protein, 21 aa, Artificial Sequence
  Synthetic
NKVFNNCHHFVYSLYNKIKQK

SEQ ID NO: 1310 - protein, 17 aa, Artificial Sequence
  Synthetic
KIKRIVQKILESAERTA

SEQ ID NO: 1311 - protein, 13 aa, Artificial Sequence
  Synthetic
CKKFISELFGFGK

SEQ ID NO: 1312 - protein, 27 aa, Artificial Sequence
  Synthetic
YTTLKDFLESLRRIMQKKYWQCGSSTF

SEQ ID NO: 1313 - protein, 26 aa, Artificial Sequence
  Synthetic
TTLKDFLESLRRIMQKKYWQCGSSTF

SEQ ID NO: 1314 - protein, 20 aa, Artificial Sequence
  Synthetic
ARSCCSRLGRCCREAKGYSG

SEQ ID NO: 1315 - protein, 23 aa, Artificial Sequence
  Synthetic
EFFSRLDSFIQKAISKLRSSAAN

SEQ ID NO: 1316 - protein, 13 aa, Artificial Sequence
  Synthetic
LVSGAVSLVKKLG

SEQ ID NO: 1317 - protein, 42 aa, Artificial Sequence
  Synthetic
WASKIGQTLGKIAKVGLKELIQPKREAMLRSAEAQGKRPWIL

SEQ ID NO: 1318 - protein, 24 aa, Artificial Sequence
  Synthetic
LMSSIGKALGGLIVDVLKPKTPAS

SEQ ID NO: 1319 - protein, 24 aa, Artificial Sequence
  Synthetic
LMSSIGKALGGLIVDVLKPKTPAS

SEQ ID NO: 1320 - protein, 36 aa, Artificial Sequence
  Synthetic
KVYSSVRKICKSCGLIRRHGKLFVRCINSKHNQRQN

SEQ ID NO: 1321 - protein, 20 aa, Artificial Sequence
  Synthetic
KEYLERLKSLIQKMIHQHLS

SEQ ID NO: 1322 - protein, 23 aa, Artificial Sequence
  Synthetic
WGALAKGALKLIPSLFSSFSKKD

SEQ ID NO: 1323 - protein, 28 aa, Artificial Sequence
  Synthetic
QILNRCDKIWNYCSSLGSAPYVSKFDSV

SEQ ID NO: 1324 - protein, 14 aa, Artificial Sequence
  Synthetic
LEKLAKKFRGCKNK

SEQ ID NO: 1325 - protein, 33 aa, Artificial Sequence
  Synthetic
AVDTLCKLFRNYSNFLRGKLTLYTGEACRRRDR

SEQ ID NO: 1326 - protein, 29 aa, Artificial Sequence
  Synthetic
KVLSEAVEQCTKACSSVCTGGSTAAVKSA

SEQ ID NO: 1327 - protein, 29 aa, Artificial Sequence
  Synthetic
KVLSEAVEQCTKACSSVCTGGSTAAVKSA

SEQ ID NO: 1328 - protein, 34 aa, Artificial Sequence
  Synthetic
FKELERAGQRVRDAIISAGPAVATVGQAAAIARG

SEQ ID NO: 1329 - protein, 34 aa, Artificial Sequence
  Synthetic
FKELERAGQRVRDAIISAAPAVATVGQAAAIARG

SEQ ID NO: 1330 - protein, 33 aa, Artificial Sequence
  Synthetic
GIFDVVKGVLKGVGKNVAGSLLEQLKCKLSGGC

SEQ ID NO: 1331 - protein, 16 aa, Artificial Sequence
  Synthetic
RLQKIIQKILKKAKSS

SEQ ID NO: 1332 - protein, 14 aa, Artificial Sequence
  Synthetic
LEKLAKKFKGCKNK

SEQ ID NO: 1333 - protein, 14 aa, Artificial Sequence
  Synthetic
LEKLAKKFKGCKNK

SEQ ID NO: 1334 - protein, 19 aa, Artificial Sequence
  Synthetic
EKAADKAKKFGGKIKKWFG

SEQ ID NO: 1335 - protein, 21 aa, Artificial Sequence
  Synthetic
TIVEFLNKWITFCQSIFSTMT

SEQ ID NO: 1336 - protein, 16 aa, Artificial Sequence
  Synthetic
LSSVARTMIKRLEHFI

SEQ ID NO: 1337 - protein, 21 aa, Artificial Sequence
  Synthetic
GNGKRGCSRWCRDHSRCCGRR

SEQ ID NO: 1338 - protein, 20 aa, Artificial Sequence
  Synthetic
LRQYLKELNEYYAIMGRTRF

SEQ ID NO: 1339 - protein, 26 aa, Artificial Sequence
  Synthetic
VIDDLKKVAKKVRRELLCKKHHKKLN

SEQ ID NO: 1340 - protein, 28 aa, Artificial Sequence
  Synthetic
LCQQLISDIRNLQQKIRKCVCGEPQWMI

SEQ ID NO: 1341 - protein, 21 aa, Artificial Sequence
  Synthetic
EVAQFISKLLNYSKQLFRYGH

SEQ ID NO: 1342 - protein, 34 aa, Artificial Sequence
  Synthetic
KDCCHVINDLADDCFPIIFPGKPYIAALVKHACS

SEQ ID NO: 1343 - protein, 12 aa, Artificial Sequence
  Synthetic
INEAKDFLDKAK

SEQ ID NO: 1344 - protein, 22 aa, Artificial Sequence
  Synthetic
LDRICEDCYNLFREPQVHSLCM

SEQ ID NO: 1345 - protein, 39 aa, Artificial Sequence
  Synthetic
LLRGVLHMLDALLVHIEGHLRHLATQRQIQIKGTSTQSG

SEQ ID NO: 1346 - protein, 29 aa, Artificial Sequence
  Synthetic
SEFFNRLESLVQRLSGKLLCCHLVDLVPS

SEQ ID NO: 1347 - protein, 13 aa, Artificial Sequence
  Synthetic
KWVQDYIKDMKEN

SEQ ID NO: 1348 - protein, 14 aa, Artificial Sequence
  Synthetic
LNKAVGKVVDFVKS

SEQ ID NO: 1349 - protein, 18 aa, Artificial Sequence
  Synthetic
MKQIGTCVGRAVKCCRKK

SEQ ID NO: 1350 - protein, 16 aa, Artificial Sequence
  Synthetic
MLRDLRDAFSRVKTFF

SEQ ID NO: 1351 - protein, 29 aa, Artificial Sequence
  Synthetic
WKDWLKKGKEWLKAKGPGIVKAALQAATQ

SEQ ID NO: 1352 - protein, 12 aa, Artificial Sequence
  Synthetic
HCIKSIGRCVAH

SEQ ID NO: 1353 - protein, 20 aa, Artificial Sequence
  Synthetic
FLDALKKFAKGGMNAVLNPK

SEQ ID NO: 1354 - protein, 27 aa, Artificial Sequence
  Synthetic
SCWTRVTSAFESITQLFRLYFARRLVG

SEQ ID NO: 1355 - protein, 18 aa, Artificial Sequence
  Synthetic
FIKKLMTFIQKVLKNTRV

SEQ ID NO: 1356 - protein, 12 aa, Artificial Sequence
  Synthetic
HCIKSIGRCVAH

SEQ ID NO: 1357 - protein, 20 aa, Artificial Sequence
  Synthetic
MAKYAAELRRYINRLTRPRY

SEQ ID NO: 1358 - protein, 34 aa, Artificial Sequence
  Synthetic
IQNLYNIITRICYRVGASGGLVTFSLLSSSCSSS

SEQ ID NO: 1359 - protein, 12 aa, Artificial Sequence
  Synthetic
AVLNKVTDMVNQ

SEQ ID NO: 1360 - protein, 19 aa, Artificial Sequence
  Synthetic
EKAADKAKKFGGKIKKWFG

SEQ ID NO: 1361 - protein, 19 aa, Artificial Sequence
  Synthetic
EKAADKAKKFGGKIKKWFG

SEQ ID NO: 1362 - protein, 16 aa, Artificial Sequence
  Synthetic
MLRDLRDAFSRVKTFF

SEQ ID NO: 1363 - protein, 33 aa, Artificial Sequence
  Synthetic
GLFDVVKGVLKGVGKNVAGSLLEQLKCKLSGGC

SEQ ID NO: 1364 - protein, 35 aa, Artificial Sequence
  Synthetic
IEKWEKIIYNICNNAFLLKGSMPINLRKRHKWMNI

SEQ ID NO: 1365 - protein, 37 aa, Artificial Sequence
  Synthetic
RKAINELIKVMNDLSPKSNLRKRKRSQNLFRGRRASM

SEQ ID NO: 1366 - protein, 19 aa, Artificial Sequence
  Synthetic
EKAADKAKKFGGKIKKWFG

SEQ ID NO: 1367 - protein, 19 aa, Artificial Sequence
  Synthetic
EKAADKAKKFGGKIKKWFG

SEQ ID NO: 1368 - protein, 11 aa, Artificial Sequence
  Synthetic
AVKKYLNSVLT

SEQ ID NO: 1369 - protein, 11 aa, Artificial Sequence
  Synthetic
AVKKYLNSVLT

SEQ ID NO: 1370 - protein, 11 aa, Artificial Sequence
  Synthetic
AVKKYLNSVLT

SEQ ID NO: 1371 - protein, 11 aa, Artificial Sequence
  Synthetic
AVKKYLNSVLT

SEQ ID NO: 1372 - protein, 15 aa, Artificial Sequence
  Synthetic
ILSFIKGLAEHLGKK

SEQ ID NO: 1373 - protein, 38 aa, Artificial Sequence
  Synthetic
LEEARQAFQTFKPDWNKIRYDAMKMQTSLGQMKKRFNL

SEQ ID NO: 1374 - protein, 12 aa, Artificial Sequence
  Synthetic
YSKVLAIAQNFV

SEQ ID NO: 1375 - protein, 37 aa, Artificial Sequence
  Synthetic
RKAINELIKVMNDLSPRSNLRKRKRSQNLFRGRRASK

SEQ ID NO: 1376 - protein, 37 aa, Artificial Sequence; identical to SEQ ID NO: 1375
  Synthetic

SEQ ID NO: 1377 - protein, 19 aa, Artificial Sequence
  Synthetic
EKAVDKAKKFGGKIKKWFG

SEQ ID NO: 1378 - protein, 24 aa, Artificial Sequence
  Synthetic
LDTLKGLAGKLLQGLKCIKAGCKP

SEQ ID NO: 1379 - protein, 33 aa, Artificial Sequence
  Synthetic
RKAVSELFSVLQKLVETSTSKRKRSQSPKRCRC

SEQ ID NO: 1380 - protein, 29 aa, Artificial Sequence
  Synthetic
FLKGVGTTLASVGKVVSDQFGKLLQAGQG

SEQ ID NO: 1381 - protein, 15 aa, Artificial Sequence
  Synthetic
IKKIVQKILDSGKNN

SEQ ID NO: 1382 - protein, 15 aa, Artificial Sequence
  Synthetic
DCCSDFCSTMSDVCQ

SEQ ID NO: 1383 - protein, 32 aa, Artificial Sequence
  Synthetic
GILSTFKGLAKGVAKDLAGNLLDKFKCKITGC

SEQ ID NO: 1384 - protein, 16 aa, Artificial Sequence
  Synthetic
LKKVIQKILDSGNKKN

SEQ ID NO: 1385 - protein, 21 aa, Artificial Sequence
  Synthetic
LKDFLENLKRIMQKRYSKCRR

SEQ ID NO: 1386 - protein, 34 aa, Artificial Sequence
  Synthetic
RKAVHELFSVLQRLVETPTAFKRKRSQSQRRCKC

SEQ ID NO: 1387 - protein, 19 aa, Artificial Sequence
  Synthetic
KWVQNYMKHLGRKAHTLKT

SEQ ID NO: 1388 - protein, 28 aa, Artificial Sequence
  Synthetic
ILDSLKNFAKDAAGILLKKASCKLSGQC

SEQ ID NO: 1389 - protein, 11 aa, Artificial Sequence
  Synthetic
ELVSGIVEGVK

SEQ ID NO: 1390 - protein, 11 aa, Artificial Sequence
  Synthetic
ELVSGIVEGVK

SEQ ID NO: 1391 - protein, 11 aa, Artificial Sequence
  Synthetic
ELVSGIVEGVK

SEQ ID NO: 1392 - protein, 28 aa, Artificial Sequence
  Synthetic
KQIFYRLDRICEDCYSLFQEPQILSFCK

SEQ ID NO: 1393 - protein, 36 aa, Artificial Sequence
  Synthetic
LFSVVTGVLKAVGKNVAKNVGGSLLEQLKCKISGGC

SEQ ID NO: 1394 - protein, 24 aa, Artificial Sequence
  Synthetic
LLKELWTKMKGAGKAVLGKIKGLL

SEQ ID NO: 1395 - protein, 22 aa, Artificial Sequence
  Synthetic
RQFLDYLQEFLGVMGTEWTMEH

SEQ ID NO: 1396 - protein, 21 aa, Artificial Sequence
  Synthetic
STLKDLLERLKTIMKEKYSKC

SEQ ID NO: 1397 - protein, 32 aa, Artificial Sequence
  Synthetic
QQVQHVFQTAKNLPNVCKIPTVGSCQFKASPY

SEQ ID NO: 1398 - protein, 37 aa, Artificial Sequence
  Synthetic
RKAINELIKVMNDLSPRSNLRKRKRSHSLFRGRRASK

SEQ ID NO: 1399 - protein, 37 aa, Artificial Sequence
  Synthetic
RKAINELIKVMNDLSPRSNLTKRKRSQNLFRGRRASK

SEQ ID NO: 1400 - protein, 37 aa, Artificial Sequence; identical to SEQ ID NO: 1365
  Synthetic

SEQ ID NO: 1401 - protein, 37 aa, Artificial Sequence; identical to SEQ ID NO: 1365
  Synthetic

SEQ ID NO: 1402 - protein, 37 aa, Artificial Sequence
  Synthetic
RKAINELIKVMNDLSPKSNLRKRKRSQNLFRGRRAST

SEQ ID NO: 1403 - protein, 37 aa, Artificial Sequence; identical to SEQ ID NO: 1365
  Synthetic

SEQ ID NO: 1404 - protein, 16 aa, Artificial Sequence
  Synthetic
NLLRQLHTIMRDIENN

SEQ ID NO: 1405 - protein, 31 aa, Artificial Sequence
  Synthetic
KWNNAVDSVFTTIENVPSSVNTVANRLINNK

SEQ ID NO: 1406 - protein, 26 aa, Artificial Sequence
  Synthetic
FFTELGASLASLFTSWFPTTTTERNH

SEQ ID NO: 1407 - protein, 26 aa, Artificial Sequence
  Synthetic
FFTELGASLASLFTSWFPATTTERNH

SEQ ID NO: 1408 - protein, 12 aa, Artificial Sequence
  Synthetic
IATGIAALAKHL

SEQ ID NO: 1409 - protein, 26 aa, Artificial Sequence
  Synthetic
ALWKDMLSGIGKLAGQAALGAVKTLV

SEQ ID NO: 1410 - protein, 37 aa, Artificial Sequence; identical to SEQ ID NO: 1365
  Synthetic

SEQ ID NO: 1411 - protein, 12 aa, Artificial Sequence
  Synthetic
LFDIIKKIAESI

SEQ ID NO: 1412 - protein, 18 aa, Artificial Sequence
  Synthetic
FDRVLQELKDIARENLGS

SEQ ID NO: 1413 - protein, 12 aa, Artificial Sequence
  Synthetic
LFDIIKKIAESF

SEQ ID NO: 1414 - protein, 16 aa, Artificial Sequence
  Synthetic
GALKGLAKGLAEHFAN

SEQ ID NO: 1415 - protein, 35 aa, Artificial Sequence
  Synthetic
RLASLLETLIKEAEKLTQCTRRLNAIDGLTDIFQR

SEQ ID NO: 1416 - protein, 26 aa, Artificial Sequence
  Synthetic
IYEMLKDIFHVFKKGYSNPDWNNTIV

SEQ ID NO: 1417 - protein, 26 aa, Artificial Sequence
  Synthetic
IYEMLKDIFHVFKKGYSNPDWNNTIV

SEQ ID NO: 1418 - protein, 28 aa, Artificial Sequence
  Synthetic
LWSKIKTAGKSVAKAAAKAAVKAVTNAV

SEQ ID NO: 1419 - protein, 19 aa, Artificial Sequence
  Synthetic
EKAADKAKKFGGKIKRWFG

SEQ ID NO: 1420 - protein, 38 aa, Artificial Sequence; identical to SEQ ID NO: 1373
  Synthetic

SEQ ID NO: 1421 - protein, 28 aa, Artificial Sequence
  Synthetic
AVWKDFLKNIGKAAGKAVLNSVTDMVNE

SEQ ID NO: 1422 - protein, 28 aa, Artificial Sequence
  Synthetic
ILDSLKNLAKNAAQILLNKASCKLSGQC

SEQ ID NO: 1423 - protein, 32 aa, Artificial Sequence
  Synthetic
LISAVRTLMRTWKSLTIRYSTPHRYQYTGHTV

SEQ ID NO: 1424 - protein, 28 aa, Artificial Sequence
  Synthetic
ILDSLKNLAKNAGQILLNKASCKLSGQC

SEQ ID NO: 1425 - protein, 23 aa, Artificial Sequence
  Synthetic
EVIQLVKNLLTYVRGVYRHGNFR

SEQ ID NO: 1426 - protein, 13 aa, Artificial Sequence
  Synthetic
ILDAIKAIAKAAG

SEQ ID NO: 1427 - protein, 22 aa, Artificial Sequence
  Synthetic
VANPYRRGCGTIERCRRDTGRK

SEQ ID NO: 1428 - protein, 19 aa, Artificial Sequence
  Synthetic
EKAADKAKKFGGKIKKWFG

SEQ ID NO: 1429 - protein, 19 aa, Artificial Sequence
  Synthetic
EKAADKAKKFGGKIKKWFG

SEQ ID NO: 1430 - protein, 19 aa, Artificial Sequence
  Synthetic
EKAADKAKKFGGKIKKWFG

SEQ ID NO: 1431 - protein, 19 aa, Artificial Sequence
  Synthetic
EKAADKAKKFGGKIKKWFG

SEQ ID NO: 1432 - protein, 19 aa, Artificial Sequence
  Synthetic
EKAADKAKKFGGKIKKWFG

SEQ ID NO: 1433 - protein, 19 aa, Artificial Sequence
  Synthetic
EKAADKAKKFGGKIKKWFG

SEQ ID NO: 1434 - protein, 19 aa, Artificial Sequence
  Synthetic
EKAADKAKKFGGKIKKWFG

SEQ ID NO: 1435 - protein, 19 aa, Artificial Sequence
  Synthetic
EKAADKAKKFGGKIKKWFG

SEQ ID NO: 1436 - protein, 19 aa, Artificial Sequence
  Synthetic
EKAADKAKKFGGKIKKWFG

SEQ ID NO: 1437 - protein, 20 aa, Artificial Sequence
  Synthetic
HEFLNSLRSFLQKVFLLLFS

SEQ ID NO: 1438 - protein, 20 aa, Artificial Sequence
  Synthetic
ARSCCSRLGRCCREAKGYSG

SEQ ID NO: 1439 - protein, 23 aa, Artificial Sequence
  Synthetic
EAIAAIYKAIQNEAERFIMCQKN

SEQ ID NO: 1440 - protein, 31 aa, Artificial Sequence
  Synthetic
LGGFLKGVGKVLAGVGKVVADQFGNLLEAGQ

SEQ ID NO: 1441 - protein, 25 aa, Artificial Sequence
  Synthetic
LLQQLQQLLQQLQQLLLLPLYRNAN

SEQ ID NO: 1442 - protein, 32 aa, Artificial Sequence
  Synthetic
MRNYMKRYLNLGESVYDYSVATCGSSTYFARK

SEQ ID NO: 1443 - protein, 28 aa, Artificial Sequence
  Synthetic
DCYRRFEKGVEKGQKCWCIETGVTFSKE

SEQ ID NO: 1444 - protein, 28 aa, Artificial Sequence
  Synthetic
DCYRRFEKGVEKGQKCWCIETGVTFSKE

SEQ ID NO: 1445 - protein, 23 aa, Artificial Sequence
  Synthetic
FLKRLLQEIKTCWNKILMGTKEH

SEQ ID NO: 1446 - protein, 33 aa, Artificial Sequence
  Synthetic
IFTECKSACEKLKKPVASLCLPPKTCRCYHFCS

SEQ ID NO: 1447 - protein, 23 aa, Artificial Sequence
  Synthetic
IRYILHSFLKVLHHLREQKGKCA

SEQ ID NO: 1448 - protein, 16 aa, Artificial Sequence
  Synthetic
LEYMEKAADKIKNLFG

SEQ ID NO: 1449 - protein, 33 aa, Artificial Sequence
  Synthetic
ASVRKMCEKCRTIRRKGRVMVICSNSKHKQRQG

SEQ ID NO: 1450 - protein, 19 aa, Artificial Sequence
  Synthetic
EKAADKAKKFGGKIKKWFG

SEQ ID NO: 1451 - protein, 37 aa, Artificial Sequence
  Synthetic
RKAISELIRVMKDLSPRSNLRKRRRSQNLFRGQRASK

SEQ ID NO: 1452 - protein, 13 aa, Artificial Sequence
  Synthetic
IPGAISAIASLFK

SEQ ID NO: 1453 - protein, 28 aa, Artificial Sequence
  Synthetic
ALWKTLLKNVGKAAGKAALNAVTDMVNQ

SEQ ID NO: 1454 - protein, 33 aa, Artificial Sequence
  Synthetic
GLLSGLKKVGKHVAKNVAVSLMDSLKCKISGDC

SEQ ID NO: 1455 - protein, 25 aa, Artificial Sequence
  Synthetic
FFTELGASLASILTSWFPANTERNH

SEQ ID NO: 1456 - protein, 37 aa, Artificial Sequence
  Synthetic
RKAISELIKVMNDLSPKANLRKRKRSQNPFRGRRALQ

SEQ ID NO: 1457 - protein, 37 aa, Artificial Sequence; identical to SEQ ID NO: 1456
  Synthetic

SEQ ID NO: 1458 - protein, 23 aa, Artificial Sequence
  Synthetic
STLEDFLERLKTIMKEKYSKCRR

SEQ ID NO: 1459 - protein, 23 aa, Artificial Sequence
  Synthetic
STLEDFLERLKTIMKEKYSKCRR

SEQ ID NO: 1460 - protein, 20 aa, Artificial Sequence
  Synthetic
KEFLERLKSLIQRMIYQHLS

SEQ ID NO: 1461 - protein, 35 aa, Artificial Sequence
  Synthetic
LWSKIKEVGKEAAKAAAKAAGKAALGAVSEAVGEQ

SEQ ID NO: 1462 - protein, 30 aa, Artificial Sequence
  Synthetic
GWKDWAKKAGGWLKKKGPGMAKAALKAAMQ

SEQ ID NO: 1463 - protein, 13 aa, Artificial Sequence
  Synthetic
YSRGCSAITRCRR

SEQ ID NO: 1464 - protein, 28 aa, Artificial Sequence
  Synthetic
EVTQFIKTLLQHSRNVFHYRSFNWSKKS

SEQ ID NO: 1465 - protein, 28 aa, Artificial Sequence
  Synthetic
EVTQFIKTLLQHSRNVFHYRSFNWSKKS

SEQ ID NO: 1466 - protein, 22 aa, Artificial Sequence
  Synthetic
ILSAGKSALKGLAKGLAEHFAN

SEQ ID NO: 1467 - protein, 36 aa, Artificial Sequence
  Synthetic
QMVSRIYQTATHLPKVCNIPQVSVCPFQKTMPGPSY

SEQ ID NO: 1468 - protein, 35 aa, Artificial Sequence; identical to SEQ ID NO: 5
  Synthetic

SEQ ID NO: 1469 - protein, 33 aa, Artificial Sequence
  Synthetic
FLDQIIRDFRNFIYQKYRRLRDEFRKLRDILSG

SEQ ID NO: 1470 - protein, 17 aa, Artificial Sequence
  Synthetic
KIKRMIQKMLSSAERTA

SEQ ID NO: 1471 - protein, 15 aa, Artificial Sequence
  Synthetic
RFASHISKCLERKRK

SEQ ID NO: 1472 - protein, 23 aa, Artificial Sequence
  Synthetic
EVAQFLKDLLRHSRIVFRNERFN

SEQ ID NO: 1473 - protein, 18 aa, Artificial Sequence
  Synthetic
LQSILELVHRVLRHLAQP

SEQ ID NO: 1474 - protein, 24 aa, Artificial Sequence
  Synthetic
RALSAICEVASETCTAWMSRQESN

SEQ ID NO: 1475 - protein, 21 aa, Artificial Sequence
  Synthetic
STLRDFLERLKAIVQRKYYRH

SEQ ID NO: 1476 - protein, 21 aa, Artificial Sequence
  Synthetic
STLKNLLERLKTIMKEKYSKC

SEQ ID NO: 1477 - protein, 21 aa, Artificial Sequence
  Synthetic
STLKNLLERLKTIMKEKYSKC

SEQ ID NO: 1478 - protein, 17 aa, Artificial Sequence
  Synthetic
DLLERLKTIMKEKYSKC

SEQ ID NO: 1479 - protein, 17 aa, Artificial Sequence
  Synthetic
DLLERLKTIMKEKYSKC

SEQ ID NO: 1480 - protein, 17 aa, Artificial Sequence
  Synthetic
DLLERLKTIMKEKYSKC

SEQ ID NO: 1481 - protein, 21 aa, Artificial Sequence
  Synthetic
IGSALKVLAGVLPSIVSWVKQ

SEQ ID NO: 1482 - protein, 20 aa, Artificial Sequence
  Synthetic
KEFLERLKSLLQKMIHQRLS

SEQ ID NO: 1483 - protein, 24 aa, Artificial Sequence
  Synthetic
LASTLGSFLGKFAKGGAQAFLQPK

SEQ ID NO: 1484 - protein, 21 aa, Artificial Sequence
  Synthetic
STLKDLLERLKTIMKEKYSKC

SEQ ID NO: 1485 - protein, 21 aa, Artificial Sequence
  Synthetic
STLKDLLERLKTIMKEKYSKC

SEQ ID NO: 1486 - protein, 21 aa, Artificial Sequence
  Synthetic
STLKDLLERLKTIMKEKYSKC

SEQ ID NO: 1487 - protein, 21 aa, Artificial Sequence
  Synthetic
STLKDLLERLKTIMKEKYSKC

SEQ ID NO: 1488 - protein, 21 aa, Artificial Sequence
  Synthetic
STLKDLLERLKTIMKEKYSKC

SEQ ID NO: 1489 - protein, 21 aa, Artificial Sequence
  Synthetic
STLKDLLERLKTIMKEKYSKC

SEQ ID NO: 1490 - protein, 21 aa, Artificial Sequence
  Synthetic
STLKDLLERLKTIMKEKYSKC

SEQ ID NO: 1491 - protein, 21 aa, Artificial Sequence
  Synthetic
STLKDLLERLKTIMKEKYSKC

SEQ ID NO: 1492 - protein, 21 aa, Artificial Sequence
  Synthetic
STLKDLLERLKTIMKEKYSKC

SEQ ID NO: 1493 - protein, 21 aa, Artificial Sequence
  Synthetic
STLKDLLERLKTIMKEKYSKC

SEQ ID NO: 1494 - protein, 21 aa, Artificial Sequence
  Synthetic
STLKDLLERLKTIMKEKYSKC

SEQ ID NO: 1495 - protein, 40 aa, Artificial Sequence
  Synthetic
MLDGLNDYCTGITSDCPRNPWKSEEDEMKWSATAKGSVLM

SEQ ID NO: 1496 - protein, 21 aa, Artificial Sequence
  Synthetic
LNRLKQFMQKLIDNLDQLKIC

SEQ ID NO: 1497 - protein, 23 aa, Artificial Sequence
  Synthetic
FLKRLLQEIKTCWNKILSGTKEH

SEQ ID NO: 1498 - protein, 36 aa, Artificial Sequence
  Synthetic
IFTLIKGAAKLIGKTVAKEAGKTGLELMACKITNQC

SEQ ID NO: 1499 - protein, 32 aa, Artificial Sequence
  Synthetic
RSIWEGIKNAGKGFLVSILDKVRCKVAGGCNP

SEQ ID NO: 1500 - protein, 23 aa, Artificial Sequence
  Synthetic
KNATTFIKKLMTFIRKASKPARV

SEQ ID NO: 1501 - protein, 21 aa, Artificial Sequence
  Synthetic
STLKDFLERLKTIMKEKYSKC

SEQ ID NO: 1502 - protein, 14 aa, Artificial Sequence
  Synthetic
YRRGCSKITRCKRD

SEQ ID NO: 1503 - protein, 36 aa, Artificial Sequence
  Synthetic
QMVSRIYQTATHLPKVCKIPQVSVCPFQKTMPGPSY

SEQ ID NO: 1504 - protein, 12 aa, Artificial Sequence
  Synthetic
GIGSCCARGWRS

SEQ ID NO: 1505 - protein, 37 aa, Artificial Sequence
  Synthetic
RKAISELIKVMNDLSPRSNLRKRKRSQTMFQGQRASK

SEQ ID NO: 1506 - protein, 28 aa, Artificial Sequence
  Synthetic
KYWTECCGRIGPHCSRCICPEVACPKNG

SEQ ID NO: 1507 - protein, 12 aa, Artificial Sequence
  Synthetic
ALVGQFGKMLNE

SEQ ID NO: 1508 - protein, 18 aa, Artificial Sequence
  Synthetic
KCVRFVKKVGEKVIEKVG

SEQ ID NO: 1509 - protein, 37 aa, Artificial Sequence
  Synthetic
RKAINELFKVMNDLSPRSNLRKRKRSQNLFRGRRASK

SEQ ID NO: 1510 - protein, 28 aa, Artificial Sequence
  Synthetic
LWSKIKEAGKAAVKAAGKAALGAVANSV

SEQ ID NO: 1511 - protein, 13 aa, Artificial Sequence
  Synthetic
NVLHSIISICRIF

SEQ ID NO: 1512 - protein, 17 aa, Artificial Sequence
  Synthetic
DLLERLKTIMREKYSKC

SEQ ID NO: 1513 - protein, 13 aa, Artificial Sequence
  Synthetic
KWVREYINTLEMS

SEQ ID NO: 1514 - protein, 24 aa, Artificial Sequence
  Synthetic
IPAYYKRCARLLTRLAVSPMCMER

SEQ ID NO: 1515 - protein, 24 aa, Artificial Sequence
  Synthetic
IPAYYKRCARLLTRLAVSPMCMER

SEQ ID NO: 1516 - protein, 21 aa, Artificial Sequence
  Synthetic
STLRDLLERLKTIMREKYSKC

SEQ ID NO: 1517 - protein, 42 aa, Artificial Sequence
  Synthetic
FGNTMGDKAREVIDRIKQSDIPAKTRNWFSETFQKVKEKLKI

SEQ ID NO: 1518 - protein, 23 aa, Artificial Sequence
  Synthetic
STLEDFLERLKTIMKEKYSKCRS

SEQ ID NO: 1519 - protein, 23 aa, Artificial Sequence
  Synthetic
STLEDFLERLKTIMKEKYSKCRS

SEQ ID NO: 1520 - protein, 23 aa, Artificial Sequence
  Synthetic
STLEDFLERLKTIMKEKYSKCRS

SEQ ID NO: 1521 - protein, 24 aa, Artificial Sequence
  Synthetic
TTVKKAVKYLRTIMKSHDPRVQES

SEQ ID NO: 1522 - protein, 14 aa, Artificial Sequence
  Synthetic
TVKNCGKKLLATPR

SEQ ID NO: 1523 - protein, 37 aa, Artificial Sequence
  Synthetic
RKAISELIKVMNDLSPKSNLRKRKRRQNQIQGRRASK

SEQ ID NO: 1524 - protein, 12 aa, Artificial Sequence
  Synthetic
SFLTRLTGYLRE

SEQ ID NO: 1525 - protein, 23 aa, Artificial Sequence
  Synthetic
STLENFLERLKTIMREKYSKCSS

SEQ ID NO: 1526 - protein, 24 aa, Artificial Sequence
  Synthetic
LVSSIGRALGGLLADVVKSKEQPA

SEQ ID NO: 1527 - protein, 24 aa, Artificial Sequence
  Synthetic
LVSSIGRALGGLLADVVKSKEQPA

SEQ ID NO: 1528 - protein, 23 aa, Artificial Sequence
  Synthetic
STLEDFLERLKTIMREKYSKCSS

SEQ ID NO: 1529 - protein, 17 aa, Artificial Sequence
  Synthetic
IVEFLNRWITFCQSIIS

SEQ ID NO: 1530 - protein, 29 aa, Artificial Sequence
  Synthetic
RGIMDTVKNAAKDLAGQLLDKLKCKITAC

SEQ ID NO: 1531 - protein, 17 aa, Artificial Sequence
  Synthetic
RLFDNILGDVVQIPRVA

SEQ ID NO: 1532 - protein, 21 aa, Artificial Sequence
  Synthetic
STLKDFLERLKTIMREKYSKC

SEQ ID NO: 1533 - protein, 13 aa, Artificial Sequence
  Synthetic
YSRGCSSITRCRR

SEQ ID NO: 1534 - protein, 37 aa, Artificial Sequence
  Synthetic
RKAINELIKVMNDLSPKSNLIKRKRSQNLFRGRRASM

SEQ ID NO: 1535 - protein, 19 aa, Artificial Sequence
  Synthetic
LKDFLERLKAIMQKKYSKH

SEQ ID NO: 1536 - protein, 21 aa, Artificial Sequence
  Synthetic
STLRDLLERLKTIMKEKYSKC

SEQ ID NO: 1537 - protein, 21 aa, Artificial Sequence
  Synthetic
STLRDLLERLKTIMKEKYSKC

SEQ ID NO: 1538 - protein, 34 aa, Artificial Sequence
  Synthetic
RGILDTLKHLAKTAGKGALQSLLNHASCKLSGQC

SEQ ID NO: 1539 - protein, 23 aa, Artificial Sequence
  Synthetic
STLENFLERLKTIMREKYSKCSS

SEQ ID NO: 1540 - protein, 23 aa, Artificial Sequence
  Synthetic
STLENFLERLKTIMREKYSKCSS

SEQ ID NO: 1541 - protein, 21 aa, Artificial Sequence
  Synthetic
STLKDFLERLKTIMKEKYSKC

SEQ ID NO: 1542 - protein, 21 aa, Artificial Sequence
  Synthetic
STLKDFLERLKTIMKEKYSKC

SEQ ID NO: 1543 - protein, 22 aa, Artificial Sequence
  Synthetic
STLKDFLERLKTIMKEKYSKCQ

SEQ ID NO: 1544 - protein, 22 aa, Artificial Sequence
  Synthetic
STLKDFLERLKTIMKEKYSKCS

SEQ ID NO: 1545 - protein, 22 aa, Artificial Sequence
  Synthetic
STLKDFLERLKTIMKEKYSKCS

SEQ ID NO: 1546 - protein, 15 aa, Artificial Sequence
  Synthetic
QLHSLCRSVFSSISN

SEQ ID NO: 1547 - protein, 11 aa, Artificial Sequence
  Synthetic
INAVSAIAKHF

SEQ ID NO: 1548 - protein, 22 aa, Artificial Sequence
  Synthetic
FKKVLHFIQKGISKLKSCKEGN

SEQ ID NO: 1549 - protein, 36 aa, Artificial Sequence
  Synthetic
LFTLIKGAAKLIGKTVAKEAGKTGLELMACKITNQC

SEQ ID NO: 1550 - protein, 14 aa, Artificial Sequence
  Synthetic
ALERCMSLWRDCAH

SEQ ID NO: 1551 - protein, 22 aa, Artificial Sequence
  Synthetic
FKKVLHFIQKGISKLKSCKEGN

SEQ ID NO: 1552 - protein, 12 aa, Artificial Sequence
  Synthetic
AIAGLVGGLINR

SEQ ID NO: 1553 - protein, 13 aa, Artificial Sequence
  Synthetic
KWVREYINSLEMS

SEQ ID NO: 1554 - protein, 20 aa, Artificial Sequence
  Synthetic
RLWRYFTRFLHKQPYYYVHI

SEQ ID NO: 1555 - protein, 36 aa, Artificial Sequence
  Synthetic
RGMWSTIRNVGKSAAKAANLPAKAALGAISEAVGEQ

SEQ ID NO: 1556 - protein, 13 aa, Artificial Sequence
  Synthetic
KTYTELFKEYFGK

SEQ ID NO: 1557 - protein, 22 aa, Artificial Sequence
  Synthetic
CKRCCSYAGEAIDKVTEAQPHN

SEQ ID NO: 1558 - protein, 22 aa, Artificial Sequence
  Synthetic
CKRCCSYAGEAIDKVTEAQPHN

SEQ ID NO: 1559 - protein, 16 aa, Artificial Sequence
  Synthetic
LNKWITFCQRIFSTLT

SEQ ID NO: 1560 - protein, 18 aa, Artificial Sequence
  Synthetic
NFLSLIKKIFSVWKREVI

SEQ ID NO: 1561 - protein, 19 aa, Artificial Sequence
  Synthetic
LKDFLENLKTILKKKYSEC

SEQ ID NO: 1562 - protein, 33 aa, Artificial Sequence
  Synthetic
TEVMEKFHRALETLPVPIQISLNFTQGKERCRV

SEQ ID NO: 1563 - protein, 37 aa, Artificial Sequence
  Synthetic
QVISRVYQTATHLPRVCNIRQVSICPFQKTMPGPGFY

SEQ ID NO: 1564 - protein, 38 aa, Artificial Sequence
  Synthetic
RGLFSILKGVGKIALKGLAKNMGKMGLDLVSCKISKEC

SEQ ID NO: 1565 - protein, 13 aa, Artificial Sequence
  Synthetic
KWVREYINSLEMS

SEQ ID NO: 1566 - protein, 13 aa, Artificial Sequence
  Synthetic
KWVREYINSLEMS

SEQ ID NO: 1567 - protein, 13 aa, Artificial Sequence
  Synthetic
YSRGCSTITRCRR

SEQ ID NO: 1568 - protein, 37 aa, Artificial Sequence
  Synthetic
RKAISELIKVMNDLSPKSNLRKRKRSQNLFRGRRASK

SEQ ID NO: 1569 - protein, 24 aa, Artificial Sequence
  Synthetic
IKGLGKNLGKMGLDLVSCKISKEC

SEQ ID NO: 1570 - protein, 36 aa, Artificial Sequence
  Synthetic
ILSLVKGAAKLLGKGLAKEGGKVGLEFIACKVTNQC

SEQ ID NO: 1571 - protein, 23 aa, Artificial Sequence
  Synthetic
STLEDFLERLKTIMREKYSKCSS

SEQ ID NO: 1572 - protein, 23 aa, Artificial Sequence
  Synthetic
STLEDFLERLKTIMREKYSKCSS

SEQ ID NO: 1573 - protein, 23 aa, Artificial Sequence
  Synthetic
STLEDFLERLKTIMREKYSKCSS

SEQ ID NO: 1574 - protein, 23 aa, Artificial Sequence
  Synthetic
STLEDFLERLKTIMREKYSKCSS

SEQ ID NO: 1575 - protein, 24 aa, Artificial Sequence
  Synthetic
KGCKKCCSYAGQAMDKVTETNSHN

SEQ ID NO: 1576 - protein, 31 aa, Artificial Sequence
  Synthetic
CYDCGKACFRRGKNLARCKKFVCRCTKSGIK

SEQ ID NO: 1577 - protein, 21 aa, Artificial Sequence
  Synthetic
DEAQKALQRLIDAVQAIIGSD

SEQ ID NO: 1578 - protein, 27 aa, Artificial Sequence
  Synthetic
ADQFANKWGRSGKDPNHFRPAGLPSKY

SEQ ID NO: 1579 - protein, 11 aa, Artificial Sequence
  Synthetic
HMRKGCSRCCS

SEQ ID NO: 1580 - protein, 15 aa, Artificial Sequence
  Synthetic
VQKIIEKILNKGSTN

SEQ ID NO: 1581 - protein, 36 aa, Artificial Sequence
  Synthetic
FFSLIKGVAKIATKGLAKNLGKMGLDLVGCKISKEC

SEQ ID NO: 1582 - protein, 13 aa, Artificial Sequence
  Synthetic
AKGIAKEFCNCPD

SEQ ID NO: 1583 - protein, 27 aa, Artificial Sequence
  Synthetic
ADQFANEWGRSGKDPNHFRPAGLPKRY

SEQ ID NO: 1584 - protein, 17 aa, Artificial Sequence
  Synthetic
DFLERLKTIMKEKYSKC

SEQ ID NO: 1585 - protein, 20 aa, Artificial Sequence
  Synthetic
RKAMENIVYMIHSFFLPFAS

SEQ ID NO: 1586 - protein, 11 aa, Artificial Sequence
  Synthetic
HVRKGCSRCCS

SEQ ID NO: 1587 - protein, 21 aa, Artificial Sequence
  Synthetic
STLKDFLERLKTIMKEKYSKC

SEQ ID NO: 1588 - protein, 21 aa, Artificial Sequence
  Synthetic
STLKDFLERLKTIMKEKYSKC

SEQ ID NO: 1589 - protein, 16 aa, Artificial Sequence
  Synthetic
FADLFGKAVDFIKSRV

SEQ ID NO: 1590 - protein, 24 aa, Artificial Sequence
  Synthetic
LVSSIGKALGGLLADVVKTKEQPA

SEQ ID NO: 1591 - protein, 31 aa, Artificial Sequence
  Synthetic
FLDIINKLGKTFAGHMLDKIKCTIGTCPPSP

SEQ ID NO: 1592 - protein, 23 aa, Artificial Sequence
  Synthetic
STLENFLERLKTIMREKYSKCSS

SEQ ID NO: 1593 - protein, 28 aa, Artificial Sequence
  Synthetic
KDWVKIAGGWLKKKGPGILKAAMAAATQ

SEQ ID NO: 1594 - protein, 15 aa, Artificial Sequence
  Synthetic
VQKVLQRMLKGSKAT

SEQ ID NO: 1595 - protein, 27 aa, Artificial Sequence
  Synthetic
KDWMKTAGEWLKKKGPGILKAAMAAAT

SEQ ID NO: 1596 - protein, 25 aa, Artificial Sequence
  Synthetic
SILRGLEKLAKMGIALTNCKATKKC

SEQ ID NO: 1597 - protein, 25 aa, Artificial Sequence
  Synthetic
SILRGLEKLAKMGIALTNCKATKKC

SEQ ID NO: 1598 - protein, 31 aa, Artificial Sequence
  Synthetic
DEWAEKLRSWLRSWQERNVTVYNSICNRRGK

SEQ ID NO: 1599 - protein, 15 aa, Artificial Sequence
  Synthetic
CKTACSDLCQDVDDA

SEQ ID NO: 1600 - protein, 27 aa, Artificial Sequence
  Synthetic
KLFRVYSNFLRGKLKLYTGEACRRGDR

SEQ ID NO: 1601 - protein, 27 aa, Artificial Sequence
  Synthetic
LTTLKDFLESLKSILRGKYLQSCTSMS

SEQ ID NO: 1602 - protein, 27 aa, Artificial Sequence
  Synthetic
LTTLKDFLESLKSILRGKYLQSCTSMS

SEQ ID NO: 1603 - protein, 11 aa, Artificial Sequence
  Synthetic
INAVSALAKHF

SEQ ID NO: 1604 - protein, 25 aa, Artificial Sequence
  Synthetic
FKKAGTDLLNFLSSFIDPKKQPATR

SEQ ID NO: 1605 - protein, 14 aa, Artificial Sequence
  Synthetic
YSRGCSAITRCRRS

SEQ ID NO: 1606 - protein, 22 aa, Artificial Sequence
  Synthetic
NAILNGLGKGMNFIENTFSFCV

SEQ ID NO: 1607 - protein, 28 aa, Artificial Sequence
  Synthetic
EWIQRMMEVLRKRSSSTLPVPVFKRKIP

SEQ ID NO: 1608 - protein, 12 aa, Artificial Sequence
  Synthetic
AIAGLVHGLINR

SEQ ID NO: 1609 - protein, 21 aa, Artificial Sequence
  Synthetic
STLRDLLERLKTIMKEKYSKC

SEQ ID NO: 1610 - protein, 33 aa, Artificial Sequence
  Synthetic
FKELERAGQRVRDAIISAGPAVATVAQATALAK

SEQ ID NO: 1611 - protein, 17 aa, Artificial Sequence
  Synthetic
DLLERLKTIMKEKYSKC

SEQ ID NO: 1612 - protein, 21 aa, Artificial Sequence
  Synthetic
STLRDLLERLKTIMKEKYSKC

SEQ ID NO: 1613 - protein, 12 aa, Artificial Sequence
  Synthetic
KCINRMCKCYGC

SEQ ID NO: 1614 - protein, 34 aa, Artificial Sequence
  Synthetic
FKELERAGQRVRDAVISAAPAVATVGQAAAIARG

SEQ ID NO: 1615 - protein, 34 aa, Artificial Sequence
  Synthetic
FKELERAGQRVRDAVISAAAVATVGQAAAIARGG

SEQ ID NO: 1616 - protein, 20 aa, Artificial Sequence
  Synthetic
MLKDFLERLKTIMKEKYSKC

SEQ ID NO: 1617 - protein, 29 aa, Artificial Sequence
  Synthetic
LWKSLLKGAGQLVGGVVQHFMGSQGQPES

SEQ ID NO: 1618 - protein, 19 aa, Artificial Sequence
  Synthetic
EKAAGKAKKFGGKIKKWFG

SEQ ID NO: 1619 - protein, 19 aa, Artificial Sequence
  Synthetic
EKAAGKAKKFGGKIKKWFG

SEQ ID NO: 1620 - protein, 31 aa, Artificial Sequence
  Synthetic
CYDCGKACFRRGKNLARCQKFVCRCTISKLR

SEQ ID NO: 1621 - protein, 26 aa, Artificial Sequence
  Synthetic
IPAYYKRCARLLTRLAVSPVCMEDKQ

SEQ ID NO: 1622 - protein, 33 aa, Artificial Sequence
  Synthetic
QIADLFDSGLSDADDLFDSGLSDADAKFMKMFM

SEQ ID NO: 1623 - protein, 11 aa, Artificial Sequence
  Synthetic
SAITHCYRYAR

SEQ ID NO: 1624 - protein, 25 aa, Artificial Sequence
  Synthetic
VKKAGTDLINFLNNFMDLKAQPATQ

SEQ ID NO: 1625 - protein, 23 aa, Artificial Sequence
  Synthetic
VLSNVIGYLKKLGTGALNAVLKQ

SEQ ID NO: 1626 - protein, 24 aa, Artificial Sequence
  Synthetic
LVASIGRALGGLLADVVKSKEQPA

SEQ ID NO: 1627 - protein, 12 aa, Artificial Sequence
  Synthetic
KCINRVCKCYGC

SEQ ID NO: 1628 - protein, 34 aa, Artificial Sequence
  Synthetic
FGKRGLRNLDNLDDDIFEPEMSEADLRYLQDLLR

SEQ ID NO: 1629 - protein, 32 aa, Artificial Sequence
  Synthetic
LLDKLKNFAKTAGKGVLQSLLNTASCKLSGQC

SEQ ID NO: 1630 - protein, 32 aa, Artificial Sequence; identical to SEQ ID NO: 1629
  Synthetic

SEQ ID NO: 1631 - protein, 32 aa, Artificial Sequence; identical to SEQ ID NO: 1629
  Synthetic

SEQ ID NO: 1632 - protein, 19 aa, Artificial Sequence
  Synthetic
LKDFLERLKTIMKEKYSKC

SEQ ID NO: 1633 - protein, 23 aa, Artificial Sequence
  Synthetic
KAARKAAKAAKKAAKAAKASAAA

SEQ ID NO: 1634 - protein, 32 aa, Artificial Sequence
  Synthetic
GILSSIKGVAKGVAKNVAAQLLDTLKCKITGC

SEQ ID NO: 1635 - protein, 22 aa, Artificial Sequence
  Synthetic
NAILNGLGKGMNFIENTFSFCV

SEQ ID NO: 1636 - protein, 22 aa, Artificial Sequence
  Synthetic
NAILNGLGKGMNFIENTFSFCV

SEQ ID NO: 1637 - protein, 37 aa, Artificial Sequence
  Synthetic
RKAVSELKKVMNDLLPHSTLRKRKRSQSSIRGRRASK

SEQ ID NO: 1638 - protein, 22 aa, Artificial Sequence
  Synthetic
NAILNRLGKGMNFIENTFSFCV

SEQ ID NO: 1639 - protein, 21 aa, Artificial Sequence
  Synthetic
STLKDLLEGLKTIMKEKYSKC

SEQ ID NO: 1640 - protein, 14 aa, Artificial Sequence
  Synthetic
DKLKEFGNTLEDKA

SEQ ID NO: 1641 - protein, 13 aa, Artificial Sequence
  Synthetic
KIVQKMLKSGIRK

SEQ ID NO: 1642 - protein, 11 aa, Artificial Sequence
  Synthetic
NAVSAIAKHFG

SEQ ID NO: 1643 - protein, 11 aa, Artificial Sequence
  Synthetic
NAVSAIAKHFG

SEQ ID NO: 1644 - protein, 11 aa, Artificial Sequence
  Synthetic
NAVSAIAKHFG

SEQ ID NO: 1645 - protein, 19 aa, Artificial Sequence
  Synthetic
SDFVQGMKKAAEDMKNKVI

SEQ ID NO: 1646 - protein, 34 aa, Artificial Sequence
  Synthetic
SFLEQADRLMKNLQEINLVDRNSKLSLRLKRLTK

SEQ ID NO: 1647 - protein, 31 aa, Artificial Sequence
  Synthetic
DALSKLFRIYSNFLRGKLTLYTGEACRRGDR

SEQ ID NO: 1648 - protein, 31 aa, Artificial Sequence; identical to SEQ ID NO: 1647
  Synthetic

SEQ ID NO: 1649 - protein, 31 aa, Artificial Sequence; identical to SEQ ID NO: 1647
  Synthetic

SEQ ID NO: 1650 - protein, 23 aa, Artificial Sequence
  Synthetic
STLENFLERLKTIMREKYSKCSS

SEQ ID NO: 1651 - protein, 23 aa, Artificial Sequence
  Synthetic
STLENFLERLKTIMREKYSKCSS

SEQ ID NO: 1652 - protein, 23 aa, Artificial Sequence
  Synthetic
STLENFLERLKTIMREKYSKCSS

SEQ ID NO: 1653 - protein, 23 aa, Artificial Sequence
  Synthetic
STLENFLERLKTIMREKYSKCSS

SEQ ID NO: 1654 - protein, 23 aa, Artificial Sequence
  Synthetic
STLENFLERLKTIMREKYSKCSS

SEQ ID NO: 1655 - protein, 23 aa, Artificial Sequence
  Synthetic
STLENFLERLKTIMREKYSKCSS

SEQ ID NO: 1656 - protein, 25 aa, Artificial Sequence
  Synthetic
SILKGLEKLAKMGIALTNCKATKKC

SEQ ID NO: 1657 - protein, 23 aa, Artificial Sequence
  Synthetic
STLEDFLERLKTIMREKYSKCSS

SEQ ID NO: 1658 - protein, 23 aa, Artificial Sequence
  Synthetic
STLEDFLERLKTIMREKYSKCSS

SEQ ID NO: 1659 - protein, 29 aa, Artificial Sequence
  Synthetic
KAKSALKDVLKKAKDKVKEKVAQHFLKQL

SEQ ID NO: 1660 - protein, 34 aa, Artificial Sequence
  Synthetic
VRKIYQTAKHLPNVCDIPQVDVCPFNIPSFPSFY

SEQ ID NO: 1661 - protein, 17 aa, Artificial Sequence
  Synthetic
TTFIEKLTTFIRKASKT

SEQ ID NO: 1662 - protein, 22 aa, Artificial Sequence
  Synthetic
KWVQDAMKYLDENSRTTKYSSF

SEQ ID NO: 1663 - protein, 29 aa, Artificial Sequence
  Synthetic
RGIMDTVKGVAKTVAASLLDKLKCKITGC

SEQ ID NO: 1664 - protein, 12 aa, Artificial Sequence
  Synthetic
DLASGIVEAIKS

SEQ ID NO: 1665 - protein, 16 aa, Artificial Sequence
  Synthetic
YRRGCSVITHCYRQTS

SEQ ID NO: 1666 - protein, 42 aa, Artificial Sequence
  Synthetic
CFKKFPKGITRLPWVIRGCAATCPKAEARVYVDCCARDKCNR

SEQ ID NO: 1667 - protein, 35 aa, Artificial Sequence
  Synthetic
NLLKMLSKAVDALKSDKKVRTIIIRSEVPGIFCAE

SEQ ID NO: 1668 - protein, 13 aa, Artificial Sequence
  Synthetic
KWVREYINSLEMS

SEQ ID NO: 1669 - protein, 13 aa, Artificial Sequence
  Synthetic
DFAKHVIGIASKL

SEQ ID NO: 1670 - protein, 19 aa, Artificial Sequence
  Synthetic
EKAAGKAKKFGGKIKKWFG

SEQ ID NO: 1671 - protein, 25 aa, Artificial Sequence
  Synthetic
EQFQNCLSKICTDVQKTLGISESVK

SEQ ID NO: 1672 - protein, 18 aa, Artificial Sequence
  Synthetic
KGVPKFAKGLFGMLPFFK

SEQ ID NO: 1673 - protein, 15 aa, Artificial Sequence
  Synthetic
DMWEDVYELMQNWQR

SEQ ID NO: 1674 - protein, 22 aa, Artificial Sequence
  Synthetic
EVAHFITKLLSYTKQLFRHGPF

SEQ ID NO: 1675 - protein, 21 aa, Artificial Sequence
  Synthetic
ATRFMEKLMTFVRKASKKTRL

SEQ ID NO: 1676 - protein, 11 aa, Artificial Sequence
  Synthetic
INAVSAIAKHF

SEQ ID NO: 1677 - protein, 20 aa, Artificial Sequence
  Synthetic
YNRGCSVITRCARDTNDIKT

SEQ ID NO: 1678 - protein, 13 aa, Artificial Sequence
  Synthetic
GRDVSQWIRGCRV

SEQ ID NO: 1679 - protein, 19 aa, Artificial Sequence
  Synthetic
SIVRHFVTEVRDMFFYFIL

SEQ ID NO: 1680 - protein, 28 aa, Artificial Sequence
  Synthetic
LWSKIKEAGKAAVKAAGKAALGAVADSV

SEQ ID NO: 1681 - protein, 16 aa, Artificial Sequence
  Synthetic
RLQKIIQKLLKSDKSS

SEQ ID NO: 1682 - protein, 19 aa, Artificial Sequence
  Synthetic
EKAAGKAKKFGGKIRKWFG

SEQ ID NO: 1683 - protein, 18 aa, Artificial Sequence
  Synthetic
FAGLLASILKPIIDAAKG

SEQ ID NO: 1684 - protein, 27 aa, Artificial Sequence
  Synthetic
KLFRIYSNFLRGKLKLYTGEACRRGDR

SEQ ID NO: 1685 - protein, 19 aa, Artificial Sequence
  Synthetic
EKAADKAKKFGGKIKKWFG

SEQ ID NO: 1686 - protein, 29 aa, Artificial Sequence
  Synthetic
FLDTLKGAAKDVAGKLEGLKCKITGCKLP

SEQ ID NO: 1687 - protein, 19 aa, Artificial Sequence
  Synthetic
EKAAGKAKKFGGKIKKWFG

SEQ ID NO: 1688 - protein, 19 aa, Artificial Sequence
  Synthetic
EKAAGKAKKFGGKIKKWFG

SEQ ID NO: 1689 - protein, 19 aa, Artificial Sequence
  Synthetic
EKAAGKAKKFGGKIKKWFG

SEQ ID NO: 1690 - protein, 19 aa, Artificial Sequence
  Synthetic
EKAAGKAKKFGGKIKKWFG

SEQ ID NO: 1691 - protein, 19 aa, Artificial Sequence
  Synthetic
EKAAGKAKKFGGKIKKWFG

SEQ ID NO: 1692 - protein, 19 aa, Artificial Sequence
  Synthetic
EKAAGKAKKFGGKIKKWFG

SEQ ID NO: 1693 - protein, 19 aa, Artificial Sequence
  Synthetic
EKAAGKAKKFGGKIKKWFG

SEQ ID NO: 1694 - protein, 35 aa, Artificial Sequence
  Synthetic
MWSKIKNAGKAAAKASKKAAGKAALGAVSEALGEQ

SEQ ID NO: 1695 - protein, 16 aa, Artificial Sequence
  Synthetic
LKKVIQKILDGGNKEN

SEQ ID NO: 1696 - protein, 19 aa, Artificial Sequence
  Synthetic
SELIKELEDILEEIKMLKP

SEQ ID NO: 1697 - protein, 20 aa, Artificial Sequence
  Synthetic
RHITRLVSNCLDLATAIRQP

SEQ ID NO: 1698 - protein, 13 aa, Artificial Sequence
  Synthetic
DLAKHVIGIASKL

SEQ ID NO: 1699 - protein, 22 aa, Artificial Sequence
  Synthetic
LWQKIKNAAGDLASGIVEGIKS

SEQ ID NO: 1700 - protein, 13 aa, Artificial Sequence
  Synthetic
IVSGAVSLAKKLG

SEQ ID NO: 1701 - protein, 11 aa, Artificial Sequence
  Synthetic
NAVSALAKHFG

SEQ ID NO: 1702 - protein, 11 aa, Artificial Sequence
  Synthetic
NAVSALAKHFG

SEQ ID NO: 1703 - protein, 23 aa, Artificial Sequence
  Synthetic
EVIQLVKNLLTYARSVFRHGNFP

SEQ ID NO: 1704 - protein, 33 aa, Artificial Sequence
  Synthetic
FGKRGLSDLDDLDESFDGEVSQADIDFLKELMQ

SEQ ID NO: 1705 - protein, 17 aa, Artificial Sequence
  Synthetic
KFLQIFTDFLDNLSETL

SEQ ID NO: 1706 - protein, 16 aa, Artificial Sequence
  Synthetic
KCCGGCPRLCEKPCYD

SEQ ID NO: 1707 - protein, 12 aa, Artificial Sequence
  Synthetic
DLASGIVEGIKS

SEQ ID NO: 1708 - protein, 36 aa, Artificial Sequence
  Synthetic
IFSLVKGVAKLAGKTLAKEGGKFGLELAMCKIAKQC

SEQ ID NO: 1709 - protein, 36 aa, Artificial Sequence
  Synthetic
IFSLIKGAAQLIGKTVAKEAGKTGLELMACKVTKQC

SEQ ID NO: 1710 - protein, 19 aa, Artificial Sequence
  Synthetic
QECVQQLESLLQKAISRLA

SEQ ID NO: 1711 - protein, 28 aa, Artificial Sequence
  Synthetic
DCYRRFEQGVAKGIQCWCIGKDVTYKGV

SEQ ID NO: 1712 - protein, 35 aa, Artificial Sequence
  Synthetic
KVQKCVYQCFEKIDKRVRTKYMTTINVNKLIVDYD

SEQ ID NO: 1713 - protein, 25 aa, Artificial Sequence
  Synthetic
NWRKILGQIASVGAGLLGSLLAGYE

SEQ ID NO: 1714 - protein, 12 aa, Artificial Sequence
  Synthetic
LFDIIKNIFSGL

SEQ ID NO: 1715 - protein, 28 aa, Artificial Sequence
  Synthetic
SQCWTPCKKAIGSLQSKCMNGKCKCYNG

SEQ ID NO: 1716 - protein, 41 aa, Artificial Sequence
  Synthetic
LHWVQKLMKNIEARRKKVSPGVRAMSTKALVQRYPANSTSI

SEQ ID NO: 1717 - protein, 20 aa, Artificial Sequence
  Synthetic
FRFFYNILKSINTLFTASKN

SEQ ID NO: 1718 - protein, 15 aa, Artificial Sequence
  Synthetic
VQKIIQKILNKGKAN

SEQ ID NO: 1719 - protein, 40 aa, Artificial Sequence
  Synthetic
YIKAAWKIGRHALGDMTDEEFQDFMKEVEQAREEELQSRQ

SEQ ID NO: 1720 - protein, 33 aa, Artificial Sequence
  Synthetic
FSSLFKAGAKYLLKSVGKAGAQQLACKAANNCA

SEQ ID NO: 1721 - protein, 24 aa, Artificial Sequence
  Synthetic
LDRICEDCYNLFREPQLHMLCKYV

SEQ ID NO: 1722 - protein, 31 aa, Artificial Sequence
  Synthetic
DKLKEFGNTLEDKAREVINRIKQSELSAKTR

SEQ ID NO: 1723 - protein, 15 aa, Artificial Sequence
  Synthetic
YCRFGNTIYRLCCRR

SEQ ID NO: 1724 - protein, 27 aa, Artificial Sequence
  Synthetic
KLFRVYSNFLRGKLKLYTGEACRRGDR

SEQ ID NO: 1725 - protein, 27 aa, Artificial Sequence
  Synthetic
IMDSVKGLAKNLAGKLLDSLKCKITGC

SEQ ID NO: 1726 - protein, 19 aa, Artificial Sequence
  Synthetic
WMSKIASGIGTFLSGMQQG

SEQ ID NO: 1727 - protein, 21 aa, Artificial Sequence
  Synthetic
STLKDFLERLKTIMKEKYSKC

SEQ ID NO: 1728 - protein, 24 aa, Artificial Sequence
  Synthetic
VVDILKGAAKDLAGHLASKVMNKI

SEQ ID NO: 1729 - protein, 19 aa, Artificial Sequence
  Synthetic
REFVQQLESLLQKVAGYYE

SEQ ID NO: 1730 - protein, 17 aa, Artificial Sequence
  Synthetic
KELNQMANNCMTLANMI

SEQ ID NO: 1731 - protein, 29 aa, Artificial Sequence
  Synthetic
LTTILESFWEWFNESDDYKNPCCCSSCPF

SEQ ID NO: 1732 - protein, 31 aa, Artificial Sequence
  Synthetic
CEKITRCARDAARYTESFNVDDDESPIINLH

SEQ ID NO: 1733 - protein, 35 aa, Artificial Sequence
  Synthetic
GLFRFARGYVEARTKWINLKNGDATVEYSCYVLHY

SEQ ID NO: 1734 - protein, 22 aa, Artificial Sequence
  Synthetic
RQLRSFMQDVFRSLRCISVSQC

SEQ ID NO: 1735 - protein, 22 aa, Artificial Sequence
  Synthetic
RQFLDYLQEFLGVMSTEWTMEG

SEQ ID NO: 1736 - protein, 17 aa, Artificial Sequence
  Synthetic
KELNQMANNCMTLANMI

SEQ ID NO: 1737 - protein, 27 aa, Artificial Sequence
  Synthetic
KLFRIYSNFLRGKLKLYTGEACRRGDR

SEQ ID NO: 1738 - protein, 27 aa, Artificial Sequence
  Synthetic
KLFRIYSNFLRGKLKLYTGEACRRGDR

SEQ ID NO: 1739 - protein, 27 aa, Artificial Sequence
  Synthetic
KLFRIYSNFLRGKLKLYTGEACRRGDR

SEQ ID NO: 1740 - protein, 15 aa, Artificial Sequence
  Synthetic
SLFGALSNIGRNRNQ

SEQ ID NO: 1741 - protein, 21 aa, Artificial Sequence
  Synthetic
LEDFLDRLKTAMQEKYSKRQS

SEQ ID NO: 1742 - protein, 33 aa, Artificial Sequence
  Synthetic
GLFDVVKGVLKGAGKNVAGSLLEQLKCKLSGGC

SEQ ID NO: 1743 - protein, 19 aa, Artificial Sequence
  Synthetic
LVEQMVEKIRSIWNGKLGY

SEQ ID NO: 1744 - protein, 17 aa, Artificial Sequence
  Synthetic
FNNIFNSIYSFFKNAVQ

SEQ ID NO: 1745 - protein, 25 aa, Artificial Sequence
  Synthetic
NCLSTMRSMMTNLTKTMDNIIIIAL

SEQ ID NO: 1746 - protein, 18 aa, Artificial Sequence
  Synthetic
VKQVLNQLLKNMDHLKTC

SEQ ID NO: 1747 - protein, 20 aa, Artificial Sequence
  Synthetic
ILSAGKSIIKGLANGLAEHF

SEQ ID NO: 1748 - protein, 21 aa, Artificial Sequence
  Synthetic
LEDFLDRLKTAMQEKYSKRQS

SEQ ID NO: 1749 - protein, 21 aa, Artificial Sequence
  Synthetic
LEDFLDRLKTAMQEKYSKRQS

SEQ ID NO: 1750 - protein, 21 aa, Artificial Sequence
  Synthetic
LEDFLDRLKTAMQEKYSKRQS

SEQ ID NO: 1751 - protein, 15 aa, Artificial Sequence
  Synthetic
IKTLASNALSLISDL

SEQ ID NO: 1752 - protein, 19 aa, Artificial Sequence
  Synthetic
LGGLMKAFPAIICAVTKKC

SEQ ID NO: 1753 - protein, 12 aa, Artificial Sequence
  Synthetic
KRCHNYAKKCVT

SEQ ID NO: 1754 - protein, 15 aa, Artificial Sequence
  Synthetic
FFKKLWRGVKKVVKK

SEQ ID NO: 1755 - protein, 22 aa, Artificial Sequence
  Synthetic
AYYKRCARLLTRLAVSPLCSQT

SEQ ID NO: 1756 - protein, 17 aa, Artificial Sequence
  Synthetic
FLNRWITFCQSIISTLT

SEQ ID NO: 1757 - protein, 17 aa, Artificial Sequence
  Synthetic
FLNRWITFCQSIISTLT

SEQ ID NO: 1758 - protein, 17 aa, Artificial Sequence
  Synthetic
FLNRWITFCQSIISTLT

SEQ ID NO: 1759 - protein, 17 aa, Artificial Sequence
  Synthetic
FLNRWITFCQSIISTLT

SEQ ID NO: 1760 - protein, 17 aa, Artificial Sequence
  Synthetic
FLNRWITFCQSIISTLT

SEQ ID NO: 1761 - protein, 17 aa, Artificial Sequence
  Synthetic
FLNRWITFCQSIISTLT

SEQ ID NO: 1762 - protein, 17 aa, Artificial Sequence
  Synthetic
FLNRWITFCQSIISTLT

SEQ ID NO: 1763 - protein, 17 aa, Artificial Sequence
  Synthetic
FLNRWITFCQSIISTLT

SEQ ID NO: 1764 - protein, 17 aa, Artificial Sequence
  Synthetic
FLNRWITFCQSIISTLT

SEQ ID NO: 1765 - protein, 17 aa, Artificial Sequence
  Synthetic
FLNRWITFCQSIISTLT

SEQ ID NO: 1766 - protein, 17 aa, Artificial Sequence
  Synthetic
FLNRWITFCQSIISTLT

SEQ ID NO: 1767 - protein, 17 aa, Artificial Sequence
  Synthetic
FLNRWITFCQSIISTLT

SEQ ID NO: 1768 - protein, 17 aa, Artificial Sequence
  Synthetic
FLNRWITFCQSIISTLT

SEQ ID NO: 1769 - protein, 28 aa, Artificial Sequence
  Synthetic
NCYRRFEQGVAKGIQCWCIEKDVTYKGV

SEQ ID NO: 1770 - protein, 22 aa, Artificial Sequence
  Synthetic
NAILNGLGKGMNFIENTFSFCV

SEQ ID NO: 1771 - protein, 22 aa, Artificial Sequence
  Synthetic
NAILNGLGKGMNFIENTFSFCV

SEQ ID NO: 1772 - protein, 17 aa, Artificial Sequence
  Synthetic
FLNKWITFCQSIFSTLT

SEQ ID NO: 1773 - protein, 17 aa, Artificial Sequence
  Synthetic
QVKKVVQKALKRVEKQN

SEQ ID NO: 1774 - protein, 41 aa, Artificial Sequence
  Synthetic
LKQILHSWGEECRACAEKTDYVNLIQELAPKYAATHPKTEL

SEQ ID NO: 1775 - protein, 34 aa, Artificial Sequence
  Synthetic
RLYSFLQNCFTNIKYKYKEYTNINLCRLSIYISK

SEQ ID NO: 1776 - protein, 27 aa, Artificial Sequence
  Synthetic
TDCTTCIQDAAKKIREVCPNQSDARIL

SEQ ID NO: 1777 - protein, 28 aa, Artificial Sequence
  Synthetic
VRGMASKAGAIAGKIAKVALKALGRRDS

SEQ ID NO: 1778 - protein, 28 aa, Artificial Sequence
  Synthetic
VRGMASKAGAIAGKIAKVALKALGRRDS

SEQ ID NO: 1779 - protein, 41 aa, Artificial Sequence
  Synthetic
LKSVANTIPGINDDFAKQLPAKCGVNIGVPFSKTVDCNSIN

SEQ ID NO: 1780 - protein, 12 aa, Artificial Sequence
  Synthetic
HCIKSIGRCVAH

SEQ ID NO: 1781 - protein, 36 aa, Artificial Sequence
  Synthetic
ILSLVKGVAKLAGKGLAKEGGKFGLELIACKIAKQC

SEQ ID NO: 1782 - protein, 19 aa, Artificial Sequence
  Synthetic
LGGLMKAFPALICAVTKKC

SEQ ID NO: 1783 - protein, 24 aa, Artificial Sequence
  Synthetic
GRKLYNQIRRWPEWLENVDSIKNA

SEQ ID NO: 1784 - protein, 25 aa, Artificial Sequence
  Synthetic
KTIKNLLKAINKQRTKRSPRTRKEA

SEQ ID NO: 1785 - protein, 33 aa, Artificial Sequence
  Synthetic
LWKDVLKKIGTVALHAGKAAFGAAADTISQGGS

SEQ ID NO: 1786 - protein, 30 aa, Artificial Sequence
  Synthetic
LWKDVLKKIGTVALHAGKAALGAVADTISQ

SEQ ID NO: 1787 - protein, 17 aa, Artificial Sequence
  Synthetic
KELSQMANNCMTLANMI

SEQ ID NO: 1788 - protein, 16 aa, Artificial Sequence
  Synthetic
FCKRFAGGAKKCHCYC

SEQ ID NO: 1789 - protein, 29 aa, Artificial Sequence
  Synthetic
GLWETIKNFGKKFTLNILHKLKCKIGGGC

SEQ ID NO: 1790 - protein, 33 aa, Artificial Sequence
  Synthetic
SQLRNLIRSVRTVMRVPLIIVNSIAIVLLLLFG

SEQ ID NO: 1791 - protein, 25 aa, Artificial Sequence
  Synthetic
NMANKCRDCCGGGKKCFGPQCLCNR

SEQ ID NO: 1792 - protein, 14 aa, Artificial Sequence
  Synthetic
GVNAIENMLSFCFR

SEQ ID NO: 1793 - protein, 36 aa, Artificial Sequence
  Synthetic
LFSILRGAAKFASKGLGKDLTKLGVDLVACKISKQC

SEQ ID NO: 1794 - protein, 20 aa, Artificial Sequence
  Synthetic
LLGSIGNAIGAFIANKLKPK

SEQ ID NO: 1795 - protein, 23 aa, Artificial Sequence
  Synthetic
LENCGDACVNFCNGDAGLTSLTA

SEQ ID NO: 1796 - protein, 26 aa, Artificial Sequence
  Synthetic
GQCDKCCKKAGDRAGNCVYFKCKCNQ

SEQ ID NO: 1797 - protein, 13 aa, Artificial Sequence
  Synthetic
KWVREYINALELS

SEQ ID NO: 1798 - protein, 41 aa, Artificial Sequence
  Synthetic
TWARNCYNVCRLPGTISREICAKKCDCKIISGTTCPSDYPK

SEQ ID NO: 1799 - protein, 16 aa, Artificial Sequence
  Synthetic
KWVQRYIALLREQQQS

SEQ ID NO: 1800 - protein, 30 aa, Artificial Sequence
  Synthetic
KIMDPVKDLFSKMSRSRSSSYQSYRSSSNY

SEQ ID NO: 1801 - protein, 17 aa, Artificial Sequence
  Synthetic
LRRALEQFQEFLESNKK

SEQ ID NO: 1802 - protein, 21 aa, Artificial Sequence
  Synthetic
LEDFLDRLKTAMQEKYSKRQS

SEQ ID NO: 1803 - protein, 12 aa, Artificial Sequence
  Synthetic
FYGSYTGLGSSL

SEQ ID NO: 1804 - protein, 18 aa, Artificial Sequence
  Synthetic
LKWIQEYLEKALNKRLKM

SEQ ID NO: 1805 - protein, 16 aa, Artificial Sequence
  Synthetic
FGTWAKSISGLYCKCY

SEQ ID NO: 1806 - protein, 20 aa, Artificial Sequence
  Synthetic
YSRGCDTITRCARDTNDINT

SEQ ID NO: 1807 - protein, 42 aa, Artificial Sequence
  Synthetic
QVWNSVCATAIAVMAEIFAAMLVRMRGQAAARTPAAKAQKTQ

SEQ ID NO: 1808 - protein, 33 aa, Artificial Sequence
  Synthetic
MWKDVLKKIGTVALHAGKAALGAVADTISQGEQ

SEQ ID NO: 1809 - protein, 18 aa, Artificial Sequence
  Synthetic
LKWIQEYLEKALNKRFKM

SEQ ID NO: 1810 - protein, 18 aa, Artificial Sequence
  Synthetic
LKWIQEYLEKALNKRFKM

SEQ ID NO: 1811 - protein, 27 aa, Artificial Sequence
  Synthetic
QAFNELIRVVHQLLPESSLRKRKRSRC

SEQ ID NO: 1812 - protein, 16 aa, Artificial Sequence
  Synthetic
NHLENFVSTLTKLMEL

SEQ ID NO: 1813 - protein, 14 aa, Artificial Sequence
  Synthetic
DLLAHLVGKISEKV

SEQ ID NO: 1814 - protein, 19 aa, Artificial Sequence
  Synthetic
EKAAGEAKKFGGKIKKWFG

SEQ ID NO: 1815 - protein, 33 aa, Artificial Sequence
  Synthetic
IIKCINHVCQYVGNLPDFASQIPKSTKMPYKGE

SEQ ID NO: 1816 - protein, 18 aa, Artificial Sequence
  Synthetic
CSNFCSTLSDVCQESWSG

SEQ ID NO: 1817 - protein, 18 aa, Artificial Sequence
  Synthetic
YWIHMLRYVAKTFLEKWA

SEQ ID NO: 1818 - protein, 22 aa, Artificial Sequence
  Synthetic
RQFLDYLQEFLGVMSTEWAMEG

SEQ ID NO: 1819 - protein, 33 aa, Artificial Sequence
  Synthetic
GLLSAVKGVLKGAGKNVAGSLMDKLKCKLFGGC

SEQ ID NO: 1820 - protein, 16 aa, Artificial Sequence
  Synthetic
IKKIVQKIMEDGGSAA

SEQ ID NO: 1821 - protein, 12 aa, Artificial Sequence
  Synthetic
LFDIIKNIVSTL

SEQ ID NO: 1822 - protein, 22 aa, Artificial Sequence
  Synthetic
NQFLDYLQEFLGVMNTEWIIES

SEQ ID NO: 1823 - protein, 25 aa, Artificial Sequence
  Synthetic
GLFKVLGSVAKHLLPHVAPIIAEKL

SEQ ID NO: 1824 - protein, 24 aa, Artificial Sequence
  Synthetic
GLFKVLGSVAKHLLPHVAPVIAEK

SEQ ID NO: 1825 - protein, 24 aa, Artificial Sequence
  Synthetic
GLFKVLGSVAKHLLPHVAPVIAEK

SEQ ID NO: 1826 - protein, 18 aa, Artificial Sequence
  Synthetic
CSNFCSTMSDVCQENWSG

SEQ ID NO: 1827 - protein, 14 aa, Artificial Sequence
  Synthetic
HYGKKALQKVSEKL

SEQ ID NO: 1828 - protein, 27 aa, Artificial Sequence
  Synthetic
QAFNELIRVVHQLLPESSLRKRKRSRC

SEQ ID NO: 1829 - protein, 27 aa, Artificial Sequence
  Synthetic
QAFNELIRVVHQLLPESSLRKRKRSRC

SEQ ID NO: 1830 - protein, 19 aa, Artificial Sequence
  Synthetic
LPGFIGKICRKICMMQQTH

SEQ ID NO: 1831 - protein, 13 aa, Artificial Sequence
  Synthetic
ERLKKMGGNLNSP

SEQ ID NO: 1832 - protein, 27 aa, Artificial Sequence
  Synthetic
CEGAVSQCTNACSNFCTKGSAKVVETA

SEQ ID NO: 1833 - protein, 22 aa, Artificial Sequence
  Synthetic
MSAIVKVVSNIIRPLVLKNFII

SEQ ID NO: 1834 - protein, 16 aa, Artificial Sequence
  Synthetic
LQAFLAKMKEIAAQTL

SEQ ID NO: 1835 - protein, 26 aa, Artificial Sequence
  Synthetic
EKLKTFYQKLVEKAEDLKGDLKAKLS

SEQ ID NO: 1836 - protein, 19 aa, Artificial Sequence
  Synthetic
GFKDLLKGAAKALVKTVLF

SEQ ID NO: 1837 - protein, 28 aa, Artificial Sequence
  Synthetic
DCYRRFEQGVAKGIQCWCIEKDVTYKGV

SEQ ID NO: 1838 - protein, 25 aa, Artificial Sequence
  Synthetic
WLGSALKIGAKLLPSVVGLFKKKKQ

SEQ ID NO: 1839 - protein, 25 aa, Artificial Sequence
  Synthetic
WLGSALKIGAKLLPSVVGLFQKKKK

SEQ ID NO: 1840 - protein, 15 aa, Artificial Sequence
  Synthetic
VKKIIDKMLNQASSN

SEQ ID NO: 1841 - protein, 19 aa, Artificial Sequence
  Synthetic
FKTLLHNLWDLLKQSLGLP

SEQ ID NO: 1842 - protein, 20 aa, Artificial Sequence
  Synthetic
STVTKIFKSLNSFLNSNSVK

SEQ ID NO: 1843 - protein, 35 aa, Artificial Sequence
  Synthetic
GMFRFARGYVEARTKLFDMKTGDATVESNCYILHY

SEQ ID NO: 1844 - protein, 28 aa, Artificial Sequence
  Synthetic
DCYRRFEQGVAKGIQCWCIEKDVTYKGI

SEQ ID NO: 1845 - protein, 28 aa, Artificial Sequence
  Synthetic
DCYRRFEQGVAKGIQCWCIEKDVTYKGV

SEQ ID NO: 1846 - protein, 28 aa, Artificial Sequence
  Synthetic
DCYRRFEQGVAKGIQCWCIEKDVTYKGV

SEQ ID NO: 1847 - protein, 28 aa, Artificial Sequence
  Synthetic
DCYRRFEQGVAKGIQCWCIEKDVTYKGV

SEQ ID NO: 1848 - protein, 35 aa, Artificial Sequence
  Synthetic
CKRACRTCCTHCRRVPPGTDGYANQTTCGGALKCP

SEQ ID NO: 1849 - protein, 28 aa, Artificial Sequence
  Synthetic
EVMKEAVERCNNACSEVCTKGSYAVATA

SEQ ID NO: 1850 - protein, 19 aa, Artificial Sequence
  Synthetic
EKAAGKAKKFGGKIKKWFG

SEQ ID NO: 1851 - protein, 26 aa, Artificial Sequence
  Synthetic
RYLQAYLKVIGNYTCHLLFGTHKKTL

SEQ ID NO: 1852 - protein, 13 aa, Artificial Sequence
  Synthetic
CSNFCHTWANVCL

SEQ ID NO: 1853 - protein, 33 aa, Artificial Sequence
  Synthetic
GLFSVVTGVLKAVGKNVAGSLLEQLKCKISGGC

SEQ ID NO: 1854 - protein, 23 aa, Artificial Sequence
  Synthetic
NFLNDIGKRGLQWSRSEQPSAYY

SEQ ID NO: 1855 - protein, 41 aa, Artificial Sequence
  Synthetic
DVCRNFMRRYQSRVTQGLVAGETAQQICEDLRLCIPSTGPL

SEQ ID NO: 1856 - protein, 16 aa, Artificial Sequence
  Synthetic
QVLSWIEEIIRKAESN

SEQ ID NO: 1857 - protein, 24 aa, Artificial Sequence
  Synthetic
AIENIADFFTRVCNTHNPSSRQRP

SEQ ID NO: 1858 - protein, 31 aa, Artificial Sequence
  Synthetic
RVVRECAHSCEQCASTLCAHGAGHIFNDAPV

SEQ ID NO: 1859 - protein, 19 aa, Artificial Sequence
  Synthetic
GILDFAKTVVGGIRNALGI

SEQ ID NO: 1860 - protein, 25 aa, Artificial Sequence
  Synthetic
GVLDILKGAAKDLAGHVATKVINKI

SEQ ID NO: 1861 - protein, 42 aa, Artificial Sequence
  Synthetic
KAVEKVKRVFSELQERGVYKAMSEFDIFINYIETYMTTKMQK

SEQ ID NO: 1862 - protein, 35 aa, Artificial Sequence
  Synthetic
FKELEKVGQRVRDAVISAGPAVATVAQATALAKGK

SEQ ID NO: 1863 - protein, 28 aa, Artificial Sequence
  Synthetic
HKAVNELIRVIHQLSPESSLRKRKRSRC

SEQ ID NO: 1864 - protein, 32 aa, Artificial Sequence
  Synthetic
WRRVMHCFSYCWRPLPADYKCNRFTVPNPPPK

SEQ ID NO: 1865 - protein, 29 aa, Artificial Sequence
  Synthetic
FLDTLKGAAKDVAGKLLEGLKCKIAGCKP

SEQ ID NO: 1866 - protein, 29 aa, Artificial Sequence
  Synthetic
GLWETIKNFGKKFTLNILHNLKCKIGGGC

SEQ ID NO: 1867 - protein, 13 aa, Artificial Sequence
  Synthetic
MEKAAGKIKNLFG

SEQ ID NO: 1868 - protein, 15 aa, Artificial Sequence
  Synthetic
LGHAVGNVLGGLFKS

SEQ ID NO: 1869 - protein, 16 aa, Artificial Sequence
  Synthetic
IKKIVQKMLDSGKKKN

SEQ ID NO: 1870 - protein, 24 aa, Artificial Sequence
  Synthetic
LWDDLKAAAKKVVSSLASAAIEKL

SEQ ID NO: 1871 - protein, 40 aa, Artificial Sequence
  Synthetic
DHLKDLGSRARAWLRSSKDNLLNKAHSLCPQLLCRPSDQN

SEQ ID NO: 1872 - protein, 21 aa, Artificial Sequence
  Synthetic
HNAAKAGFKLIKPIEKLIMPK

SEQ ID NO: 1873 - protein, 12 aa, Artificial Sequence
  Synthetic
ANEVYKKCPGMP

SEQ ID NO: 1874 - protein, 25 aa, Artificial Sequence
  Synthetic
NMAKKCRDCCGGNGKCFGPQCLCNR

SEQ ID NO: 1875 - protein, 33 aa, Artificial Sequence
  Synthetic
KVMNYLVETMLKLFQTQFIHLILHPLTFIYSAR

SEQ ID NO: 1876 - protein, 25 aa, Artificial Sequence
  Synthetic
NMAKKCRDCCGGNGKCFGPQCLCNR

SEQ ID NO: 1877 - protein, 26 aa, Artificial Sequence
  Synthetic
NMAKKCRDCCGGNGKCFGYQCLCNRG

SEQ ID NO: 1878 - protein, 21 aa, Artificial Sequence
  Synthetic
VYQCMDRIPNLCQRRCTAAAR

SEQ ID NO: 1879 - protein, 21 aa, Artificial Sequence
  Synthetic
VYQCMDRIPNLCQRRCTAAAR

SEQ ID NO: 1880 - protein, 21 aa, Artificial Sequence
  Synthetic
VYQCMDRIPNLCQRRCTAAAR

SEQ ID NO: 1881 - protein, 42 aa, Artificial Sequence
  Synthetic
GEEAMKKYSQILSHFEKLEPQAAVVKALGELDILLQWMEETE

SEQ ID NO: 1882 - protein, 19 aa, Artificial Sequence
  Synthetic
LYRYLTRFLHRYPIYYIRY

SEQ ID NO: 1883 - protein, 19 aa, Artificial Sequence
  Synthetic
KWVQNAMEYLNQKSQTLKS

SEQ ID NO: 1884 - protein, 21 aa, Artificial Sequence
  Synthetic
SDFENYIRTVSTTISPLLLIP

SEQ ID NO: 1885 - protein, 27 aa, Artificial Sequence
  Synthetic
KECWSVCEKLYNTSRGKCMNKKCRCYS

SEQ ID NO: 1886 - protein, 20 aa, Artificial Sequence
  Synthetic
VQRCLSTLKQGPRSGNKVIA

SEQ ID NO: 1887 - protein, 30 aa, Artificial Sequence
  Synthetic
LTKLLDSMHDVVENLLSFCFQTFLDKSMSI

SEQ ID NO: 1888 - protein, 25 aa, Artificial Sequence
  Synthetic
ENIRRVFNDCRDIIQRMHLRQYELL

SEQ ID NO: 1889 - protein, 22 aa, Artificial Sequence
  Synthetic
ALNRLQAALQDMLRRLDLSPGC

SEQ ID NO: 1890 - protein, 27 aa, Artificial Sequence
  Synthetic
KLFRIYSNFLRGKLKLYTGEACRRGDR

SEQ ID NO: 1891 - protein, 22 aa, Artificial Sequence
  Synthetic
SAILNGLGKGMNFIENTFSFCV

SEQ ID NO: 1892 - protein, 30 aa, Artificial Sequence
  Synthetic
WNNAVDSVFTTIENVPSSVNTVANRLINNK

SEQ ID NO: 1893 - protein, 20 aa, Artificial Sequence
  Synthetic
CQNIQSLLNTIVKWLFIVHL

SEQ ID NO: 1894 - protein, 27 aa, Artificial Sequence
  Synthetic
KLFRVYSNFLRGKLKLYTGEACRRGDR

SEQ ID NO: 1895 - protein, 27 aa, Artificial Sequence
  Synthetic
KLFRVYSNFLRGKLKLYTGEACRRGDR

SEQ ID NO: 1896 - protein, 22 aa, Artificial Sequence
  Synthetic
LLKLAAKGVAKVIPHLIPSRQQ

SEQ ID NO: 1897 - protein, 17 aa, Artificial Sequence
  Synthetic
ARLSDILHNVNRRAGGV

SEQ ID NO: 1898 - protein, 23 aa, Artificial Sequence
  Synthetic
FLKNAFKVVDQVFQKKLRLYLLF

SEQ ID NO: 1899 - protein, 32 aa, Artificial Sequence
  Synthetic
GHICESFKSFCKDSGRNGVKLRANCKKTCGLC

SEQ ID NO: 1900 - protein, 19 aa, Artificial Sequence
  Synthetic
REFVQLLESLLQKAMTRLV

SEQ ID NO: 1901 - protein, 16 aa, Artificial Sequence
  Synthetic
LLDFLKAAGKGLVTNL

SEQ ID NO: 1902 - protein, 19 aa, Artificial Sequence
  Synthetic
LLGSIGNAIGAFIANKLKP

SEQ ID NO: 1903 - protein, 42 aa, Artificial Sequence
  Synthetic
KAVEQVKRAFSKLQDRGVYKAMSEFDIFINYIETYVTTKMQK

SEQ ID NO: 1904 - protein, 12 aa, Artificial Sequence
  Synthetic
WFDVVKHIASAV

SEQ ID NO: 1905 - protein, 20 aa, Artificial Sequence
  Synthetic
AKKALAKAKTVLKLLLNKDN

SEQ ID NO: 1906 - protein, 23 aa, Artificial Sequence
  Synthetic
VYQCMDRVPNFCQRRCNGAVAAH

SEQ ID NO: 1907 - protein, 21 aa, Artificial Sequence
  Synthetic
KAVEFLNKWITFCQSIYSTMT

SEQ ID NO: 1908 - protein, 27 aa, Artificial Sequence
  Synthetic
KAVLDCLKAAGSSLSKAAITAIYNKIT

SEQ ID NO: 1909 - protein, 27 aa, Artificial Sequence
  Synthetic
KLFRIYSNFLRGKLKLYTGEACRRGDR

SEQ ID NO: 1910 - protein, 19 aa, Artificial Sequence
  Synthetic
EKAAGKAKKFGGKVKKWFG

SEQ ID NO: 1911 - protein, 32 aa, Artificial Sequence
  Synthetic
INSFFEKATEFVKKNIVLSSGFVGGFLLGLAS

SEQ ID NO: 1912 - protein, 22 aa, Artificial Sequence
  Synthetic
AYYKRCARLLTRLAMSPLCMQS

SEQ ID NO: 1913 - protein, 33 aa, Artificial Sequence
  Synthetic
SQLTNLIRSVRTVMRVPLIIVNSVAIVLLLLFG

SEQ ID NO: 1914 - protein, 17 aa, Artificial Sequence
  Synthetic
REIANLVDSCVQKCRNK

SEQ ID NO: 1915 - protein, 33 aa, Artificial Sequence
  Synthetic
FGRRGLNDLDDLDELFDGEISQADVDFLNELMR

SEQ ID NO: 1916 - protein, 19 aa, Artificial Sequence
  Synthetic
KCIDLVNNVLKEVASSRKT

SEQ ID NO: 1917 - protein, 27 aa, Artificial Sequence
  Synthetic
AFNAVKRLLDQARQLGRVNEENQGVQI

SEQ ID NO: 1918 - protein, 40 aa, Artificial Sequence
  Synthetic
EWVQRYMKNLDAKQKKASPRARAVAVKGPVQRYPGNQTTC

SEQ ID NO: 1919 - protein, 19 aa, Artificial Sequence
  Synthetic
ECVYFLQKFLKYATKHLGR

SEQ ID NO: 1920 - protein, 41 aa, Artificial Sequence
  Synthetic
CLKGIARGIHNLNEDNARSIPPKCGVNLPYTISLNIDCSRV

SEQ ID NO: 1921 - protein, 27 aa, Artificial Sequence
  Synthetic
GHQAIETGLNIFRGLFKGKKKNKKTKG

SEQ ID NO: 1922 - protein, 24 aa, Artificial Sequence
  Synthetic
DCYSACKKLVGKATGKCTNGRCDC

SEQ ID NO: 1923 - protein, 42 aa, Artificial Sequence
  Synthetic
KLAKDITKMAKQRAKEYVVKKLNGPPEEEVAAIDALMNSLDY

SEQ ID NO: 1924 - protein, 33 aa, Artificial Sequence
  Synthetic
LGKRGLNELDDLDELFDGEISQADIDFLKELMS

SEQ ID NO: 1925 - protein, 13 aa, Artificial Sequence
  Synthetic
YSRGCSKIARCRS

SEQ ID NO: 1926 - protein, 19 aa, Artificial Sequence
  Synthetic
KKVQKCLNKCYDICDVKLI

SEQ ID NO: 1927 - protein, 15 aa, Artificial Sequence
  Synthetic
NSLASHLTSFVSRWQ

SEQ ID NO: 1928 - protein, 21 aa, Artificial Sequence
  Synthetic
AGTVAKDVVKLVNDLRSCMSV

SEQ ID NO: 1929 - protein, 17 aa, Artificial Sequence
  Synthetic
NWVKRAVNLLSLRVKKM

SEQ ID NO: 1930 - protein, 21 aa, Artificial Sequence
  Synthetic
SQVFRYVTDMVKSVGVDCGRS

SEQ ID NO: 1931 - protein, 19 aa, Artificial Sequence
  Synthetic
ISNFLSTLMSIFTNPDSCK

SEQ ID NO: 1932 - protein, 33 aa, Artificial Sequence
  Synthetic
LGKRGLNNLNDFDELFDGEITKADLDFMREIMK

SEQ ID NO: 1933 - protein, 32 aa, Artificial Sequence
  Synthetic
LWSKIKAAGKEAAKAAAKAAGKAALNAVSEAV

SEQ ID NO: 1934 - protein, 32 aa, Artificial Sequence; identical to SEQ ID NO: 1933
  Synthetic

SEQ ID NO: 1935 - protein, 20 aa, Artificial Sequence
  Synthetic
IASVAAKVFSKIFCAISKKC

SEQ ID NO: 1936 - protein, 33 aa, Artificial Sequence
  Synthetic
RSLGGVISGAKKVAKVAIPIGKAVLPVVAKLVG

SEQ ID NO: 1937 - protein, 16 aa, Artificial Sequence
  Synthetic
LQAFLAKMKEIAAQTL

SEQ ID NO: 1938 - protein, 12 aa, Artificial Sequence
  Synthetic
NPLTDIINKLTD

SEQ ID NO: 1939 - protein, 33 aa, Artificial Sequence
  Synthetic
FGKRGLENMDKFDELFDGDLSEADLDFLKELMR

SEQ ID NO: 1940 - protein, 12 aa, Artificial Sequence
  Synthetic
KAALNEINQIVQ

SEQ ID NO: 1941 - protein, 39 aa, Artificial Sequence
  Synthetic
VEGLCSKFPDCNKHCKEQGFLGGQCLKLGVNMLCFCIHT

SEQ ID NO: 1942 - protein, 14 aa, Artificial Sequence
  Synthetic
RKWATPCKEIYSPN

SEQ ID NO: 1943 - protein, 42 aa, Artificial Sequence
  Synthetic
SKWIAPLERLVAFPSGVAGGVGITCWLVVCNKVVALILQAVS

SEQ ID NO: 1944 - protein, 21 aa, Artificial Sequence
  Synthetic
RVMEQVFSYLLDIIRIDVDVQ

SEQ ID NO: 1945 - protein, 23 aa, Artificial Sequence
  Synthetic
KSCKEFMENMISLAKALSAQRSP

SEQ ID NO: 1946 - protein, 33 aa, Artificial Sequence
  Synthetic
LGRRGLNELDNLDELFDGEISQADIDFLKELMS

SEQ ID NO: 1947 - protein, 39 aa, Artificial Sequence
  Synthetic
VEGLCSKFPDCNKHCKEQKFPGGTCLKLGVNMMCTCIYS

SEQ ID NO: 1948 - protein, 14 aa, Artificial Sequence
  Synthetic
YDAVYNGCLDKLRH

SEQ ID NO: 1949 - protein, 31 aa, Artificial Sequence
  Synthetic
GKGYIRGCADTCPKLQNRDVIFCCSTDKCNL

SEQ ID NO: 1950 - protein, 13 aa, Artificial Sequence
  Synthetic
KAALNAVTDMVNQ

SEQ ID NO: 1951 - protein, 22 aa, Artificial Sequence
  Synthetic
CKRCCSYAGEAMDKVTEAQPHN

SEQ ID NO: 1952 - protein, 30 aa, Artificial Sequence; identical to SEQ ID NO: 1892
  Synthetic

SEQ ID NO: 1953 - protein, 27 aa, Artificial Sequence
  Synthetic
REVDRLASDLQRLAKFQQHSTKHYGFL

SEQ ID NO: 1954 - protein, 33 aa, Artificial Sequence
  Synthetic
FGKRGLRNFDDLDDTFEPEMSEADLKYLQDLLR

SEQ ID NO: 1955 - protein, 25 aa, Artificial Sequence
  Synthetic
RGLWSTIKNVAAAAGKAALGALGEQ

SEQ ID NO: 1956 - protein, 28 aa, Artificial Sequence
  Synthetic
LNGYIDHFKNFRKRDAELEELLSKLPIY

SEQ ID NO: 1957 - protein, 41 aa, Artificial Sequence
  Synthetic
GILDTIKSIASKVWNSKTVQDLKRKGINWVANKLGVSPQAA

SEQ ID NO: 1958 - protein, 41 aa, Artificial Sequence
  Synthetic
LLDLAKHVIGIASKLGKRSEEKRGLLDFAKHVIGIASKLGK

SEQ ID NO: 1959 - protein, 14 aa, Artificial Sequence
  Synthetic
SLLSSAFSLCQQCC

SEQ ID NO: 1960 - protein, 28 aa, Artificial Sequence
  Synthetic
DCYRRFEQGVAKGVQCWCIEKDVTYKGV

SEQ ID NO: 1961 - protein, 21 aa, Artificial Sequence
  Synthetic
GIFGKILGAGKKVLCGLSGLC

SEQ ID NO: 1962 - protein, 22 aa, Artificial Sequence
  Synthetic
CKRCCSYAGEAMDKVTEAQPHN

SEQ ID NO: 1963 - protein, 26 aa, Artificial Sequence
  Synthetic
VGTALGSLAEELNGYNRKKGGFSFRF

SEQ ID NO: 1964 - protein, 18 aa, Artificial Sequence
  Synthetic
DKIVEVVKEMGKAGLNAA

SEQ ID NO: 1965 - protein, 22 aa, Artificial Sequence
  Synthetic
VKKMLKDVPKLATSSTKIAKQN

SEQ ID NO: 1966 - protein, 23 aa, Artificial Sequence
  Synthetic
VENCGDACVNFCNGDAGLTSLDA

SEQ ID NO: 1967 - protein, 19 aa, Artificial Sequence
  Synthetic
KWVQDYVKHLDQRTQTPKT

SEQ ID NO: 1968 - protein, 29 aa, Artificial Sequence
  Synthetic
SRADQFANEWGRSGKDPNFFRPPGLPSKY

SEQ ID NO: 1969 - protein, 14 aa, Artificial Sequence
  Synthetic
KVGGLLGGLLGGIL

SEQ ID NO: 1970 - protein, 14 aa, Artificial Sequence
  Synthetic
KVGGLLGGLLGGIL

SEQ ID NO: 1971 - protein, 30 aa, Artificial Sequence
  Synthetic
GWTQIKGCIHRCPESTPNEKYQCCSTDNCI

SEQ ID NO: 1972 - protein, 29 aa, Artificial Sequence
  Synthetic
KGKQLLKDYANRVLNGPEEEAAAPAERRR

SEQ ID NO: 1973 - protein, 13 aa, Artificial Sequence
  Synthetic
KIIDKMLNKASAN

SEQ ID NO: 1974 - protein, 13 aa, Artificial Sequence
  Synthetic
KIIDKMLNKASAN

SEQ ID NO: 1975 - protein, 13 aa, Artificial Sequence
  Synthetic
KIIDKMLNKASAN

SEQ ID NO: 1976 - protein, 30 aa, Artificial Sequence
  Synthetic
LWKTMLKKLGTMALHAGKAAFGAAADTISQ

SEQ ID NO: 1977 - protein, 33 aa, Artificial Sequence
  Synthetic
LWKTMLKKLGTMALHAGKAALGAAADTISQGTQ

SEQ ID NO: 1978 - protein, 22 aa, Artificial Sequence
  Synthetic
NAILNGLGKGMNFMENTFSFCV

SEQ ID NO: 1979 - protein, 13 aa, Artificial Sequence
  Synthetic
KGLIQTVGDFIGI

SEQ ID NO: 1980 - protein, 21 aa, Artificial Sequence
  Synthetic
GIFGKILGVGKKVLCGLSGMC

SEQ ID NO: 1981 - protein, 32 aa, Artificial Sequence
  Synthetic
LWKTMLKKLGTVALHAGKAALGAAADTISQGA

SEQ ID NO: 1982 - protein, 33 aa, Artificial Sequence
  Synthetic
IGKRGLKKLDQLDDTFDSDLSDADVKLLREMFK

SEQ ID NO: 1983 - protein, 30 aa, Artificial Sequence
  Synthetic
CCRKGYNGCKRCCSYAGEAMDKVTEAQPHN

SEQ ID NO: 1984 - protein, 20 aa, Artificial Sequence
  Synthetic
LLGSIGKVLGGYLAEKLKPK

SEQ ID NO: 1985 - protein, 15 aa, Artificial Sequence
  Synthetic
YRIKKFLKRCCKKIK

SEQ ID NO: 1986 - protein, 22 aa, Artificial Sequence
  Synthetic
EEFQEFMQDIEQAREEELLSRQ

SEQ ID NO: 1987 - protein, 37 aa, Artificial Sequence
  Synthetic
RDCKGLFRQCKKSSECCKGSSCESDLTGLCIFNLPGR

SEQ ID NO: 1988 - protein, 39 aa, Artificial Sequence
  Synthetic
VAHWLGGLLSRAGSVANTNLLPTSMGFKVYNRRRRELKA

SEQ ID NO: 1989 - protein, 25 aa, Artificial Sequence
  Synthetic
FNRASRLANEIGDLLQSHLIKLKME

SEQ ID NO: 1990 - protein, 31 aa, Artificial Sequence
  Synthetic
KWNSAVDSVFTTIENVPSSVNTVANRLINNK

SEQ ID NO: 1991 - protein, 21 aa, Artificial Sequence
  Synthetic
VGAALKVLANVLPPVISWIKQ

SEQ ID NO: 1992 - protein, 13 aa, Artificial Sequence
  Synthetic
AGKAALNKIAEAV

SEQ ID NO: 1993 - protein, 33 aa, Artificial Sequence
  Synthetic
EELDRLAHTVLNAVDHLATKLNRNGRSADPVGH

SEQ ID NO: 1994 - protein, 17 aa, Artificial Sequence
  Synthetic
ILSSIMGTLGKIVGLAP

SEQ ID NO: 1995 - protein, 19 aa, Artificial Sequence
  Synthetic
KWVQDAVKQLDKKAQTPKP

SEQ ID NO: 1996 - protein, 26 aa, Artificial Sequence
  Synthetic
RSAISMVTELLRAAKSGPGGGGTHFP

SEQ ID NO: 1997 - protein, 13 aa, Artificial Sequence
  Synthetic
KWVQEYINYLEMS

SEQ ID NO: 1998 - protein, 13 aa, Artificial Sequence
  Synthetic
KWVQEYINYLEMS

SEQ ID NO: 1999 - protein, 16 aa, Artificial Sequence
  Synthetic
WTQGLDNVFNMMFSYL

SEQ ID NO: 2000 - protein, 17 aa, Artificial Sequence
  Synthetic
IKTLQRVVRKIATDIDE

SEQ ID NO: 2001 - protein, 28 aa, Artificial Sequence
  Synthetic
QTAQNAIRNVINRLHGLDNFLFQLQQRQ

SEQ ID NO: 2002 - protein, 32 aa, Artificial Sequence
  Synthetic
LFNDLEHVCDDCYNLYRTSYVASACRSNCYSN

SEQ ID NO: 2003 - protein, 32 aa, Artificial Sequence; identical to SEQ ID NO: 2002
  Synthetic

SEQ ID NO: 2004 - protein, 32 aa, Artificial Sequence; identical to SEQ ID NO: 2002
  Synthetic

SEQ ID NO: 2005 - protein, 32 aa, Artificial Sequence
  Synthetic
FRDCCRDCKTAFSHLSCNAWYNGNYKLAKEVI

SEQ ID NO: 2006 - protein, 37 aa, Artificial Sequence
  Synthetic
RKAIHELIQVMAELSPAPKIGKRKRSQTLFRGRRASQ

SEQ ID NO: 2007 - protein, 29 aa, Artificial Sequence
  Synthetic
KGKQLLKDYANKVLNGPEEEAAAPAERRR

SEQ ID NO: 2008 - protein, 33 aa, Artificial Sequence
  Synthetic
LRTASYFISTLKKAAQKQLKAVSFFFQVMASLV

SEQ ID NO: 2009 - protein, 14 aa, Artificial Sequence
  Synthetic
TLINYFCENIRNCM

SEQ ID NO: 2010 - protein, 17 aa, Artificial Sequence
  Synthetic
EKCIYLMRKCFSFMTNQ

SEQ ID NO: 2011 - protein, 18 aa, Artificial Sequence
  Synthetic
DKIIDVVKEMGKAGLQAA

SEQ ID NO: 2012 - protein, 32 aa, Artificial Sequence
  Synthetic
ILDTLKNLAKTAGKGALQGLVKMASCKLSGQC

SEQ ID NO: 2013 - protein, 28 aa, Artificial Sequence
  Synthetic
DVGATWSKVIRGPGRSKPNWSIGGTYRW

SEQ ID NO: 2014 - protein, 19 aa, Artificial Sequence
  Synthetic
VLSQYLECVTQACGRTIKM

SEQ ID NO: 2015 - protein, 18 aa, Artificial Sequence
  Synthetic
KLVDSLLQVLKEKGGTAS

SEQ ID NO: 2016 - protein, 15 aa, Artificial Sequence
  Synthetic
LNNCGKQVPNGFECT

SEQ ID NO: 2017 - protein, 16 aa, Artificial Sequence
  Synthetic
AHACFQRIHRLTRTMR

SEQ ID NO: 2018 - protein, 13 aa, Artificial Sequence
  Synthetic
VTSVLAAILKPCF

SEQ ID NO: 2019 - protein, 18 aa, Artificial Sequence
  Synthetic
GDKLYREIQNWEGFTRRP

SEQ ID NO: 2020 - protein, 11 aa, Artificial Sequence
  Synthetic
LQDLNTVLRHF

SEQ ID NO: 2021 - protein, 41 aa, Artificial Sequence
  Synthetic
YKRGCEKITRCERDRRKQAHLRNPRKVLDVVAVMAKAKQLY

SEQ ID NO: 2022 - protein, 29 aa, Artificial Sequence
  Synthetic
SRADQFANEWGRSGKDPNFFRPPGLPSKY

SEQ ID NO: 2023 - protein, 22 aa, Artificial Sequence
  Synthetic
ALSRLQAALQDMLRRLDLSPGC

SEQ ID NO: 2024 - protein, 26 aa, Artificial Sequence
  Synthetic
NMARKCRECCGGNGKCFGPQCLCNRE

SEQ ID NO: 2025 - protein, 20 aa, Artificial Sequence
  Synthetic
WVDAFSTAAYIINRLLVPLL

SEQ ID NO: 2026 - protein, 25 aa, Artificial Sequence
  Synthetic
ENIRRVFNDCRDIIQRMHLRQYELL

SEQ ID NO: 2027 - protein, 34 aa, Artificial Sequence
  Synthetic
VRKIYQAAKYLPNICKIQQVGVCPFQIPSIPSYY

SEQ ID NO: 2028 - protein, 23 aa, Artificial Sequence
  Synthetic
WGDDMNDYCTGISSDCPRNPWKD

SEQ ID NO: 2029 - protein, 30 aa, Artificial Sequence
  Synthetic
RGFMDTAKNVAKNVAVTLIDKLRCKVTGGC

SEQ ID NO: 2030 - protein, 16 aa, Artificial Sequence
  Synthetic
IKDICKKVLEQFRDLL

SEQ ID NO: 2031 - protein, 37 aa, Artificial Sequence
  Synthetic
RKAIHELIQVMAELSPAPKIGKRRRSQTLFRGRRASQ

SEQ ID NO: 2032 - protein, 31 aa, Artificial Sequence
  Synthetic
TKCSTLLKQIRECASGCVNLNDDPVNKLSTR

SEQ ID NO: 2033 - protein, 32 aa, Artificial Sequence
  Synthetic
WKKVGSAAWGGVKAAAKGAAVGGLNALAKHIQ

SEQ ID NO: 2034 - protein, 17 aa, Artificial Sequence
  Synthetic
VQRVVEKFLKRAESQNS

SEQ ID NO: 2035 - protein, 16 aa, Artificial Sequence
  Synthetic
FQRFLETAYRALRHLA

SEQ ID NO: 2036 - protein, 24 aa, Artificial Sequence
  Synthetic
KGKEMLKDYAKGLLEGGSEEVPGQ

SEQ ID NO: 2037 - protein, 22 aa, Artificial Sequence
  Synthetic
IAEKVFEILQEAWKEFNSVTFG

SEQ ID NO: 2038 - protein, 17 aa, Artificial Sequence
  Synthetic
EMGSIISQAIRNAKKHV

SEQ ID NO: 2039 - protein, 19 aa, Artificial Sequence
  Synthetic
VKDIATALNQIIRRIQEES

SEQ ID NO: 2040 - protein, 19 aa, Artificial Sequence
  Synthetic
RWSSGFHKVFAEGTKLIVI

SEQ ID NO: 2041 - protein, 24 aa, Artificial Sequence
  Synthetic
GLFKVLGSVAKHLLPHVVPVIAEK

SEQ ID NO: 2042 - protein, 23 aa, Artificial Sequence
  Synthetic
GIFRFARGYVEARTKSFDLKAGC

SEQ ID NO: 2043 - protein, 31 aa, Artificial Sequence
  Synthetic
RSLWSKIKEMAATAGKAALNAVTGMVNQGEQ

SEQ ID NO: 2044 - protein, 19 aa, Artificial Sequence
  Synthetic
EKAADKAKKFGGKTKKWFG

SEQ ID NO: 2045 - protein, 20 aa, Artificial Sequence
  Synthetic
LLASLGKVFGGYLAEKLKPK

SEQ ID NO: 2046 - protein, 19 aa, Artificial Sequence
  Synthetic
KCLKTMYDCCKYSCSRGRC

SEQ ID NO: 2047 - protein, 17 aa, Artificial Sequence
  Synthetic
FLNKWITFCQSIYSTMT

SEQ ID NO: 2048 - protein, 32 aa, Artificial Sequence
  Synthetic
LFSLIKAGAKFLGKNLLKQGACYAACKASKQC

SEQ ID NO: 2049 - protein, 14 aa, Artificial Sequence
  Synthetic
EKFKRIANSFLQKN

SEQ ID NO: 2050 - protein, 15 aa, Artificial Sequence
  Synthetic
YQLLSFIRSLAHDIN

SEQ ID NO: 2051 - protein, 15 aa, Artificial Sequence
  Synthetic
YRIKKFLKRCCKKIK

SEQ ID NO: 2052 - protein, 15 aa, Artificial Sequence
  Synthetic
YRIKKFLKRCCKKIK

SEQ ID NO: 2053 - protein, 14 aa, Artificial Sequence
  Synthetic
LKELAGGLVTGIQS

SEQ ID NO: 2054 - protein, 31 aa, Artificial Sequence
  Synthetic
QDCYEALHKCMASHSKPFSCSMKFHMCLQQQ

SEQ ID NO: 2055 - protein, 26 aa, Artificial Sequence
  Synthetic
CDPCRKCVQSFHSGVYMCSDKKSNCS

SEQ ID NO: 2056 - protein, 32 aa, Artificial Sequence
  Synthetic
IMSIVKDVAKNAAKEAAKGALSTLSCKLAKTC

SEQ ID NO: 2057 - protein, 23 aa, Artificial Sequence
  Synthetic
DAAKLFSSWVDKLSKDIEENKKQ

SEQ ID NO: 2058 - protein, 19 aa, Artificial Sequence
  Synthetic
RDVLTRFKSWFKRVFGKKQ

SEQ ID NO: 2059 - protein, 15 aa, Artificial Sequence
  Synthetic
VENLVSFANSFIKTA

SEQ ID NO: 2060 - protein, 37 aa, Artificial Sequence
  Synthetic
RECRKMFGGCSKHEDCCAHLACKRTFNYCAWDGSFSK

SEQ ID NO: 2061 - protein, 29 aa, Artificial Sequence
  Synthetic
QSCIDHCKAIGEVIYVCFTYHCYCRKPPM

SEQ ID NO: 2062 - protein, 16 aa, Artificial Sequence
  Synthetic
REIPQCINSICKCMKG

SEQ ID NO: 2063 - protein, 28 aa, Artificial Sequence
  Synthetic
DIVKLLESIGSQSGTPSKIAKISNSGEL

SEQ ID NO: 2064 - protein, 32 aa, Artificial Sequence
  Synthetic
LFSLIKAGAKFLGKNLLKQGAQYAACKVSKEC

SEQ ID NO: 2065 - protein, 31 aa, Artificial Sequence
  Synthetic
LWSKIKEAGKAALTAAGKAALGAVSDAVGEQ

SEQ ID NO: 2066 - protein, 15 aa, Artificial Sequence
  Synthetic
YCRLGNTFYRLCCRQ

SEQ ID NO: 2067 - protein, 15 aa, Artificial Sequence
  Synthetic
YCRLGNTFYRLCCRQ

SEQ ID NO: 2068 - protein, 25 aa, Artificial Sequence
  Synthetic
WKDILKNAGKAALNEINQLVNQGEL

SEQ ID NO: 2069 - protein, 16 aa, Artificial Sequence
  Synthetic
VDSAIEKALTVWEEVT

SEQ ID NO: 2070 - protein, 37 aa, Artificial Sequence
  Synthetic
RGLWSNIKTAGKEAAKAALKAAGKAALGAVTDAVGEQ

SEQ ID NO: 2071 - protein, 12 aa, Artificial Sequence
  Synthetic
NFGGKVITIFKA

SEQ ID NO: 2072 - protein, 32 aa, Artificial Sequence
  Synthetic
IMDTLKNLAKTAGKGALQSLLNKASCKLSGQC

SEQ ID NO: 2073 - protein, 32 aa, Artificial Sequence
  Synthetic
IMDTLKNLAKTAGKGALQSLVKMASCKLSGQC

SEQ ID NO: 2074 - protein, 14 aa, Artificial Sequence
  Synthetic
LSGIIDSVANAIKG

SEQ ID NO: 2075 - protein, 26 aa, Artificial Sequence
  Synthetic
GQCDECCKKAGDRAGNCVYFKCKCNP

SEQ ID NO: 2076 - protein, 26 aa, Artificial Sequence
  Synthetic
GQCDECCKKAGDRAGNCVYLKCKCNQ

SEQ ID NO: 2077 - protein, 42 aa, Artificial Sequence
  Synthetic
CITFCNKCCRKCLCVPPGYYGNKQVCSCYNNWKTQEGGPKCP

SEQ ID NO: 2078 - protein, 20 aa, Artificial Sequence
  Synthetic
LRDYLRQINEYFAIIGRPRF

SEQ ID NO: 2079 - protein, 35 aa, Artificial Sequence
  Synthetic
SHFQEFLEKACHFLKLPLGTNITLLSPGSPHRVTC

SEQ ID NO: 2080 - protein, 15 aa, Artificial Sequence
  Synthetic
KYIEKVVDKARTVVG

SEQ ID NO: 2081 - protein, 26 aa, Artificial Sequence
  Synthetic
WAQSLVSLFQALRHDLMRSSQPGVPP

SEQ ID NO: 2082 - protein, 39 aa, Artificial Sequence
  Synthetic
ENFFKEIERAGQRIRDAIISAAPAVETLAQAQKIIKGGD

SEQ ID NO: 2083 - protein, 23 aa, Artificial Sequence
  Synthetic
FSQARSCCSRLGRCCHVGKGYSG

SEQ ID NO: 2084 - protein, 23 aa, Artificial Sequence
  Synthetic
FSQARSCCSRLGRCCHVGKGYSG

SEQ ID NO: 2085 - protein, 15 aa, Artificial Sequence
  Synthetic
KYIEKVVDKAKTVVG

SEQ ID NO: 2086 - protein, 15 aa, Artificial Sequence
  Synthetic
KYIEKVVDKAKTVVG

SEQ ID NO: 2087 - protein, 15 aa, Artificial Sequence
  Synthetic
KYIEKVVDKAKTVVG

SEQ ID NO: 2088 - protein, 15 aa, Artificial Sequence
  Synthetic
KYIEKVVDKAKTVVG

SEQ ID NO: 2089 - protein, 42 aa, Artificial Sequence
  Synthetic
ITQAIQCAKRVVRDPQGIRAWVAWQRHCKNRDLSGYIRNCGV

SEQ ID NO: 2090 - protein, 17 aa, Artificial Sequence
  Synthetic
DQAEKIAKDIIKKVRGH

SEQ ID NO: 2091 - protein, 23 aa, Artificial Sequence
  Synthetic
ERCTKLANTFFQQCKTMSEYTVY

SEQ ID NO: 2092 - protein, 18 aa, Artificial Sequence
  Synthetic
KRVKRFCKKACRKASQSK

SEQ ID NO: 2093 - protein, 18 aa, Artificial Sequence
  Synthetic
KRVKRFCKKACRKASQSK

SEQ ID NO: 2094 - protein, 20 aa, Artificial Sequence
  Synthetic
LLASLGKVLGGYLAEKLKPK

SEQ ID NO: 2095 - protein, 16 aa, Artificial Sequence
  Synthetic
CATLLRECAKECSNVH

SEQ ID NO: 2096 - protein, 36 aa, Artificial Sequence
  Synthetic
IFSLVKGAAKLAGKGLAKEGGKFGLELIACKIAKQC

SEQ ID NO: 2097 - protein, 19 aa, Artificial Sequence
  Synthetic
SAMERLNNWLKTFKHPPHH

SEQ ID NO: 2098 - protein, 21 aa, Artificial Sequence
  Synthetic
AGTVAKDVVKLVNDLRSCMSV

SEQ ID NO: 2099 - protein, 22 aa, Artificial Sequence
  Synthetic
KTLARWAQNAFSKLLRSRATKP

SEQ ID NO: 2100 - protein, 22 aa, Artificial Sequence
  Synthetic
KTLARWAQNAFSKLLRSRATKP

SEQ ID NO: 2101 - protein, 42 aa, Artificial Sequence
  Synthetic
KEGCRKFLGGCENTGQCCLHLFCKYDTPFNHFCAWDLSFGRK

SEQ ID NO: 2102 - protein, 17 aa, Artificial Sequence
  Synthetic
FLNKWITFCQSIYSTMT

SEQ ID NO: 2103 - protein, 25 aa, Artificial Sequence
  Synthetic
SKAVEQVKEAFSKLQEKGVYKAMNE

SEQ ID NO: 2104 - protein, 15 aa, Artificial Sequence
  Synthetic
CAQTIVKCIQNCVNP

SEQ ID NO: 2105 - protein, 22 aa, Artificial Sequence
  Synthetic
CKRCCSYAGEAMDKVTEVQPHN

SEQ ID NO: 2106 - protein, 19 aa, Artificial Sequence
  Synthetic
KAIKNLLKAVSKERSKRSP

SEQ ID NO: 2107 - protein, 32 aa, Artificial Sequence
  Synthetic
RGFLSTVKNLATNVAGTVIDTIKCKVTGGCRK

SEQ ID NO: 2108 - protein, 36 aa, Artificial Sequence
  Synthetic
TGIVNGIKSLVKGVGMKVFKAGLNNIGNTGCNEDEC

SEQ ID NO: 2109 - protein, 36 aa, Artificial Sequence
  Synthetic
TGIVNGIKSLVKGVGMKVFKAGLSNIGNTGCNEDEC

SEQ ID NO: 2110 - protein, 36 aa, Artificial Sequence; identical to SEQ ID NO: 2109
  Synthetic

SEQ ID NO: 2111 - protein, 20 aa, Artificial Sequence
  Synthetic
MAEQLMEKIKKLWYSRVQGY

SEQ ID NO: 2112 - protein, 24 aa, Artificial Sequence
  Synthetic
LLQEFQEILKEATELRFSGLPDTL

SEQ ID NO: 2113 - protein, 19 aa, Artificial Sequence
  Synthetic
RLQKCLHSIIKHLDHIQRC

SEQ ID NO: 2114 - protein, 42 aa, Artificial Sequence
  Synthetic
ITAAIQCAKRVVRDPQGIRAWVAWRTQCQNRDLSQYIRNCGV

SEQ ID NO: 2115 - protein, 34 aa, Artificial Sequence
  Synthetic
KKAVSSWYRAIDTLSQTIGIFRPRSLWNRSENNS

SEQ ID NO: 2116 - protein, 11 aa, Artificial Sequence
  Synthetic
LKTLQKLMENY

SEQ ID NO: 2117 - protein, 19 aa, Artificial Sequence
  Synthetic
KICRRCCSSAEEALNNKKN

SEQ ID NO: 2118 - protein, 34 aa, Artificial Sequence
  Synthetic
TCPKLIKSLVEIADQLDDDLDSTPQELCKFVYFC

SEQ ID NO: 2119 - protein, 33 aa, Artificial Sequence
  Synthetic
ASVRKICSRCVALKRHGVLIVLCSNPKHKQRQG

SEQ ID NO: 2120 - protein, 27 aa, Artificial Sequence
  Synthetic
KLFRVYANFLRGKLKLYTGEVCRRGDR

SEQ ID NO: 2121 - protein, 33 aa, Artificial Sequence
  Synthetic
FGKRGLKNLDQYNDLFDGEISDADIKYLQDLMR

SEQ ID NO: 2122 - protein, 38 aa, Artificial Sequence
  Synthetic
DNLHDYCTGISSDCPRNPYKGKYDPMKWPAAAKGSVLM

SEQ ID NO: 2123 - protein, 15 aa, Artificial Sequence
  Synthetic
ARSALENIASTVTKF

SEQ ID NO: 2124 - protein, 40 aa, Artificial Sequence
  Synthetic
YIKAAWQIGKHALGDMTDEEFQDFMKEVEQAREEELQSRQ

SEQ ID NO: 2125 - protein, 26 aa, Artificial Sequence
  Synthetic
HQCDECCKKAGDRAGNCVYYKCKCNP

SEQ ID NO: 2126 - protein, 14 aa, Artificial Sequence
  Synthetic
EKFKRIANSFLQKN

SEQ ID NO: 2127 - protein, 14 aa, Artificial Sequence
  Synthetic
EKFKRIANSFLQKN

SEQ ID NO: 2128 - protein, 14 aa, Artificial Sequence
  Synthetic
EKFKRIANSFLQKN

SEQ ID NO: 2129 - protein, 17 aa, Artificial Sequence
  Synthetic
FLNRWITFCQSIISTLT

SEQ ID NO: 2130 - protein, 17 aa, Artificial Sequence
  Synthetic
FLNRWITFCQSIISTLT

SEQ ID NO: 2131 - protein, 17 aa, Artificial Sequence
  Synthetic
FLNRWITFCQSIISTLT

SEQ ID NO: 2132 - protein, 17 aa, Artificial Sequence
  Synthetic
FLNRWITFCQSIISTLT

SEQ ID NO: 2133 - protein, 17 aa, Artificial Sequence
  Synthetic
FLNRWITFCQSIISTLT

SEQ ID NO: 2134 - protein, 17 aa, Artificial Sequence
  Synthetic
FLNRWITFCQSIISTLT

SEQ ID NO: 2135 - protein, 17 aa, Artificial Sequence
  Synthetic
FLNRWITFCQSIISTLT

SEQ ID NO: 2136 - protein, 17 aa, Artificial Sequence
  Synthetic
FLNRWITFCQSIISTLT

SEQ ID NO: 2137 - protein, 17 aa, Artificial Sequence
  Synthetic
FLNRWITFCQSIISTLT

SEQ ID NO: 2138 - protein, 42 aa, Artificial Sequence
  Synthetic
ITQAVACAKRVVRDPQGIKAWVAWRNKCQNRDLRSYVQGCRV

SEQ ID NO: 2139 - protein, 22 aa, Artificial Sequence
  Synthetic
VYQCMDRVPNFCQRRCSAIAAH

SEQ ID NO: 2140 - protein, 24 aa, Artificial Sequence
  Synthetic
VENCADACVSFCNGDAGLPSLDAY

SEQ ID NO: 2141 - protein, 20 aa, Artificial Sequence
  Synthetic
ATTFIEKLMTFIRKASRNAR

SEQ ID NO: 2142 - protein, 13 aa, Artificial Sequence
  Synthetic
KCMNKACKCYGCV

SEQ ID NO: 2143 - protein, 17 aa, Artificial Sequence
  Synthetic
FLNKWITFCQSIFSTLT

SEQ ID NO: 2144 - protein, 17 aa, Artificial Sequence
  Synthetic
FLNKWITFCQSIFSTLT

SEQ ID NO: 2145 - protein, 33 aa, Artificial Sequence
  Synthetic
LGKRGLKNADRLDELFDGDISDADLDFLRELMR

SEQ ID NO: 2146 - protein, 25 aa, Artificial Sequence
  Synthetic
SMLSVLKNLGKVGLGFVACKINKQC

SEQ ID NO: 2147 - protein, 30 aa, Artificial Sequence
  Synthetic
RGFMDTAKQVAKNVAVTLIDKLRCKVTGGC

SEQ ID NO: 2148 - protein, 32 aa, Artificial Sequence
  Synthetic
CKELGHRGGRCVDSPSKHCPGVLKNNKQCHCY

SEQ ID NO: 2149 - protein, 21 aa, Artificial Sequence
  Synthetic
KKAASVIQKILKDFGLNGGRE

SEQ ID NO: 2150 - protein, 21 aa, Artificial Sequence
  Synthetic
KKAASVIQKILKDFGLNGGRE

SEQ ID NO: 2151 - protein, 28 aa, Artificial Sequence
  Synthetic
DCYRRFEQGVAKGTQCWCIEKDVTYKGV

SEQ ID NO: 2152 - protein, 27 aa, Artificial Sequence
  Synthetic
LLDTIKGVAKTVAASMLDKLKCKISGC

SEQ ID NO: 2153 - protein, 13 aa, Artificial Sequence
  Synthetic
KCMNKVCKCYGCG

SEQ ID NO: 2154 - protein, 22 aa, Artificial Sequence
  Synthetic
VYSLADKIANALRYGGKNIILL

SEQ ID NO: 2155 - protein, 19 aa, Artificial Sequence
  Synthetic
KAIKNLLKAVSKERSKRSP

SEQ ID NO: 2156 - protein, 32 aa, Artificial Sequence
  Synthetic
IMSIVKDVAKTAAKEAAKGALSTLSCKLAKTC

SEQ ID NO: 2157 - protein, 15 aa, Artificial Sequence
  Synthetic
DFLHELTNFVRYLQK

SEQ ID NO: 2158 - protein, 16 aa, Artificial Sequence
  Synthetic
KTLQRVVRKIASDIDE

SEQ ID NO: 2159 - protein, 34 aa, Artificial Sequence
  Synthetic
NICGSVIRPLDCTRRKSRMGRFARTNCKKLCGFC

SEQ ID NO: 2160 - protein, 19 aa, Artificial Sequence
  Synthetic
KWVSEYMEILDQKSQILQP

SEQ ID NO: 2161 - protein, 34 aa, Artificial Sequence
  Synthetic
RVIKCIDHICQYARNLPDFASGISESTKMPCKGE

SEQ ID NO: 2162 - protein, 14 aa, Artificial Sequence
  Synthetic
YQRGCEKINRCRGG

SEQ ID NO: 2163 - protein, 23 aa, Artificial Sequence
  Synthetic
VEQCGDACVNFCNADAGLTSLDA

SEQ ID NO: 2164 - protein, 12 aa, Artificial Sequence
  Synthetic
FYGGYSGLGSSI

SEQ ID NO: 2165 - protein, 35 aa, Artificial Sequence
  Synthetic
WEDIVEGAKKIFEKCTEASSEVLGQAFAKDGWNVK

SEQ ID NO: 2166 - protein, 25 aa, Artificial Sequence
  Synthetic
SMLSVLKNLGKVGLGLVACKINKQC

SEQ ID NO: 2167 - protein, 17 aa, Artificial Sequence
  Synthetic
EELSQMANNCMQLANMM

SEQ ID NO: 2168 - protein, 17 aa, Artificial Sequence
  Synthetic
EELSQMANNCMQLANMM

SEQ ID NO: 2169 - protein, 17 aa, Artificial Sequence
  Synthetic
EELSQMANNCMQLANMM

SEQ ID NO: 2170 - protein, 17 aa, Artificial Sequence
  Synthetic
EELSQMANNCMQLANMM

SEQ ID NO: 2171 - protein, 14 aa, Artificial Sequence
  Synthetic
YSRGCSKIHRCRRD

SEQ ID NO: 2172 - protein, 14 aa, Artificial Sequence
  Synthetic
YSRGCSKIHRCRRD

SEQ ID NO: 2173 - protein, 14 aa, Artificial Sequence
  Synthetic
YSRGCSKIHRCRRD

SEQ ID NO: 2174 - protein, 22 aa, Artificial Sequence
  Synthetic
VYQCMDRVPNFCDRRCTAAAAH

SEQ ID NO: 2175 - protein, 19 aa, Artificial Sequence
  Synthetic
AWFSEAFGKVKEKLKTTFS

SEQ ID NO: 2176 - protein, 12 aa, Artificial Sequence
  Synthetic
FYGAYSGLGSSL

SEQ ID NO: 2177 - protein, 12 aa, Artificial Sequence
  Synthetic
FYGAYSGLGSSL

SEQ ID NO: 2178 - protein, 12 aa, Artificial Sequence
  Synthetic
FYGAYSGLGSSL

SEQ ID NO: 2179 - protein, 12 aa, Artificial Sequence
  Synthetic
FYGAYSGLGSSL

SEQ ID NO: 2180 - protein, 14 aa, Artificial Sequence
  Synthetic
KVIGVIGHLIHPPS

SEQ ID NO: 2181 - protein, 35 aa, Artificial Sequence
  Synthetic
DIESCLNECFRVYNTGFATCRGDKYSQLCTCEYNC

SEQ ID NO: 2182 - protein, 12 aa, Artificial Sequence
  Synthetic
IYGSYSGIGSSL

SEQ ID NO: 2183 - protein, 17 aa, Artificial Sequence
  Synthetic
EELSQMANNCMQLANMM

SEQ ID NO: 2184 - protein, 24 aa, Artificial Sequence
  Synthetic
RAAKDFLTTLLTILEWMNNKGCSH

SEQ ID NO: 2185 - protein, 32 aa, Artificial Sequence
  Synthetic
SILNPFRRVCNDWYNGFPGRRCTEAAGSGGNN

SEQ ID NO: 2186 - protein, 32 aa, Artificial Sequence
  Synthetic
IMDTLKNLAKTAGKGALQSLLNHASCKLSGQC

SEQ ID NO: 2187 - protein, 11 aa, Artificial Sequence
  Synthetic
TVLSYCHHIIS

SEQ ID NO: 2188 - protein, 32 aa, Artificial Sequence
  Synthetic
LISGLKNVGKEVGMDVVRTGIDIAGCKIKGEC

SEQ ID NO: 2189 - protein, 32 aa, Artificial Sequence; identical to SEQ ID NO: 2188
  Synthetic

SEQ ID NO: 2190 - protein, 16 aa, Artificial Sequence
  Synthetic
KVSNWWKRIWEKIKNK

SEQ ID NO: 2191 - protein, 16 aa, Artificial Sequence
  Synthetic
KVSNWWKRIWEKIKNK

SEQ ID NO: 2192 - protein, 32 aa, Artificial Sequence
  Synthetic
HSLLKILSTFLYQLFSSSLIVAVLTFIPFFIL

SEQ ID NO: 2193 - protein, 26 aa, Artificial Sequence
  Synthetic
GQCDECCKKAGERVGTCVYYKCKCNP

SEQ ID NO: 2194 - protein, 24 aa, Artificial Sequence
  Synthetic
EVLEIIHHFVEILDRYFGSVSVSL

SEQ ID NO: 2195 - protein, 27 aa, Artificial Sequence
  Synthetic
AGNALTFLKSLLEIFQKEKMRGMRGKI

SEQ ID NO: 2196 - protein, 24 aa, Artificial Sequence
  Synthetic
KKCATCCGGIGRCFGPQCLCNRGY

SEQ ID NO: 2197 - protein, 12 aa, Artificial Sequence
  Synthetic
IYGSYSGIGSAL

SEQ ID NO: 2198 - protein, 24 aa, Artificial Sequence
  Synthetic
VYHCMDRIANFCQRRCSPAAATAH

SEQ ID NO: 2199 - protein, 35 aa, Artificial Sequence
  Synthetic
LQNVTTCLERCIEVAQILKRISSRLDKRWTGNADN

SEQ ID NO: 2200 - protein, 17 aa, Artificial Sequence
  Synthetic
LKDFLESLKSIMQMDYS

SEQ ID NO: 2201 - protein, 32 aa, Artificial Sequence
  Synthetic
FGKRGLNDLSDLDELFDGEISEADVDFLREIM

SEQ ID NO: 2202 - protein, 15 aa, Artificial Sequence
  Synthetic
LEYIFKNIFQVASTF

SEQ ID NO: 2203 - protein, 19 aa, Artificial Sequence
  Synthetic
HKMKKLLRYLNYVAEHTAV

SEQ ID NO: 2204 - protein, 19 aa, Artificial Sequence
  Synthetic
LLASLGKVLGGYLAEKLKP

SEQ ID NO: 2205 - protein, 17 aa, Artificial Sequence
  Synthetic
GRKLYNEIRRWDHFLDN

SEQ ID NO: 2206 - protein, 23 aa, Artificial Sequence
  Synthetic
NFLNDIGKRGFHWAPSAKAAKFY

SEQ ID NO: 2207 - protein, 22 aa, Artificial Sequence
  Synthetic
VYQCMDRVPNFCQRRCSAIAAH

SEQ ID NO: 2208 - protein, 41 aa, Artificial Sequence
  Synthetic
SKAVEQVKRVFNMLQERGVYKAMSEFDIFINYIESYMTTKM

SEQ ID NO: 2209 - protein, 22 aa, Artificial Sequence
  Synthetic
LKKATRVVYKAASAAAREMNRN

SEQ ID NO: 2210 - protein, 22 aa, Artificial Sequence
  Synthetic
VYQCMDRVPNFCQRRCSAIAAH

SEQ ID NO: 2211 - protein, 37 aa, Artificial Sequence
  Synthetic
RDCRKMFGGCSKHEDCCAHLACKRTFNYCAWDGSFSK

SEQ ID NO: 2212 - protein, 29 aa, Artificial Sequence
  Synthetic
LIRFGRSAAAPLIRFGRASSAPLIRFGRK

SEQ ID NO: 2213 - protein, 19 aa, Artificial Sequence
  Synthetic
EFLRRWIAICQSIISTMTQ

SEQ ID NO: 2214 - protein, 31 aa, Artificial Sequence
  Synthetic
NPAEKWVQRLMRLVDVQNMKQMTEGRIGDSL

SEQ ID NO: 2215 - protein, 20 aa, Artificial Sequence
  Synthetic
IASVAANVFSKIFCAISKKC

SEQ ID NO: 2216 - protein, 19 aa, Artificial Sequence
  Synthetic
KAFSLADSILTGTSKVIVL

SEQ ID NO: 2217 - protein, 17 aa, Artificial Sequence
  Synthetic
ILGDWSNAISALYCRCS

SEQ ID NO: 2218 - protein, 18 aa, Artificial Sequence
  Synthetic
KFLSEIIDTCNERLDKIL

SEQ ID NO: 2219 - protein, 23 aa, Artificial Sequence
  Synthetic
FLKRLLQEIKTCWNKILSGTKEH

SEQ ID NO: 2220 - protein, 12 aa, Artificial Sequence
  Synthetic
IYGSYSGLGSSL

SEQ ID NO: 2221 - protein, 12 aa, Artificial Sequence
  Synthetic
IYGSYSGLGSSL

SEQ ID NO: 2222 - protein, 12 aa, Artificial Sequence
  Synthetic
IYGSYSGLGSSL

SEQ ID NO: 2223 - protein, 25 aa, Artificial Sequence
  Synthetic
YFHSFLDTFSKYLGSTSCPLLRLSR

SEQ ID NO: 2224 - protein, 17 aa, Artificial Sequence
  Synthetic
TLLKILSTFLYQLFSSS

SEQ ID NO: 2225 - protein, 35 aa, Artificial Sequence
  Synthetic
CSEAAYMINDLAETLGNNNEGDSLFKMTVRWKSFL

SEQ ID NO: 2226 - protein, 19 aa, Artificial Sequence
  Synthetic
KEFLNKWITFCQSILSTLA

SEQ ID NO: 2227 - protein, 26 aa, Artificial Sequence
  Synthetic
GLWNKIKEAASKAAGKAALGFVNEMV

SEQ ID NO: 2228 - protein, 36 aa, Artificial Sequence
  Synthetic
ALIKGAIHGGRFIHGMIQNHHGYDEQQELNKRAVDE

SEQ ID NO: 2229 - protein, 12 aa, Artificial Sequence
  Synthetic
FYGAYHGLGSSL

SEQ ID NO: 2230 - protein, 12 aa, Artificial Sequence
  Synthetic
LYGAYSGLGSSL

SEQ ID NO: 2231 - protein, 42 aa, Artificial Sequence
  Synthetic
ITEAVRCAKRIVSDGDGMNAWVAWRNRCRGTDVSKWIRGCRL

SEQ ID NO: 2232 - protein, 12 aa, Artificial Sequence
  Synthetic
FYGSYSGLGSSL

SEQ ID NO: 2233 - protein, 12 aa, Artificial Sequence
  Synthetic
FYGSYSGLGSSL

SEQ ID NO: 2234 - protein, 12 aa, Artificial Sequence
  Synthetic
FYGSYSGLGSSL

SEQ ID NO: 2235 - protein, 12 aa, Artificial Sequence
  Synthetic
FYGSYSGLGSSL

SEQ ID NO: 2236 - protein, 12 aa, Artificial Sequence
  Synthetic
FYGSYSGLGSSL

SEQ ID NO: 2237 - protein, 12 aa, Artificial Sequence
  Synthetic
FYGSYSGLGSSL

SEQ ID NO: 2238 - protein, 12 aa, Artificial Sequence
  Synthetic
FYGSYSGLGSSL

SEQ ID NO: 2239 - protein, 12 aa, Artificial Sequence
  Synthetic
FYGSYSGLGSSL

SEQ ID NO: 2240 - protein, 23 aa, Artificial Sequence
  Synthetic
FSQARSCCSRLGRCCHVGKGYSG

SEQ ID NO: 2241 - protein, 23 aa, Artificial Sequence
  Synthetic
FSQARSCCSRLGRCCHVGKGYSG

SEQ ID NO: 2242 - protein, 23 aa, Artificial Sequence
  Synthetic
FSQARSCCSRLGRCCHVGKGYSG

SEQ ID NO: 2243 - protein, 23 aa, Artificial Sequence
  Synthetic
FSQARSCCSRLGRCCHVGKGYSG

SEQ ID NO: 2244 - protein, 23 aa, Artificial Sequence
  Synthetic
FSQARSCCSRLGRCCHVGKGYSG

SEQ ID NO: 2245 - protein, 23 aa, Artificial Sequence
  Synthetic
FSQARSCCSRLGRCCHVGKGYSG

SEQ ID NO: 2246 - protein, 23 aa, Artificial Sequence
  Synthetic
FSQARSCCSRLGRCCHVGKGYSG

SEQ ID NO: 2247 - protein, 23 aa, Artificial Sequence
  Synthetic
FSQARSCCSRLGRCCHVGKGYSG

SEQ ID NO: 2248 - protein, 23 aa, Artificial Sequence
  Synthetic
FSQARSCCSRLGRCCHVGKGYSG

SEQ ID NO: 2249 - protein, 23 aa, Artificial Sequence
  Synthetic
FSQARSCCSRLGRCCHVGKGYSG

SEQ ID NO: 2250 - protein, 23 aa, Artificial Sequence
  Synthetic
FSQARSCCSRLGRCCHVGKGYSG

SEQ ID NO: 2251 - protein, 23 aa, Artificial Sequence
  Synthetic
FSQARSCCSRLGRCCHVGKGYSG

SEQ ID NO: 2252 - protein, 23 aa, Artificial Sequence
  Synthetic
FSQARSCCSRLGRCCHVGKGYSG

SEQ ID NO: 2253 - protein, 23 aa, Artificial Sequence
  Synthetic
FSQARSCCSRLGRCCHVGKGYSG

SEQ ID NO: 2254 - protein, 23 aa, Artificial Sequence
  Synthetic
FSQARSCCSRLGRCCHVGKGYSG

SEQ ID NO: 2255 - protein, 23 aa, Artificial Sequence
  Synthetic
FSQARSCCSRLGRCCHVGKGYSG

SEQ ID NO: 2256 - protein, 23 aa, Artificial Sequence
  Synthetic
FSQARSCCSRLGRCCHVGKGYSG

SEQ ID NO: 2257 - protein, 23 aa, Artificial Sequence
  Synthetic
FSQARSCCSRLGRCCHVGKGYSG

SEQ ID NO: 2258 - protein, 23 aa, Artificial Sequence
  Synthetic
FSQARSCCSRLGRCCHVGKGYSG

SEQ ID NO: 2259 - protein, 40 aa, Artificial Sequence
  Synthetic
TWVRDVVRSMDRKSNTRNNMIQTKPTGTQQSTNTAVTLTG

SEQ ID NO: 2260 - protein, 42 aa, Artificial Sequence
  Synthetic
IADAVACAKRVVRDPQGIRAWVAWRNRCQNRDVRQYVQGCGV

SEQ ID NO: 2261 - protein, 42 aa, Artificial Sequence; identical to SEQ ID NO: 2260
  Synthetic

SEQ ID NO: 2262 - protein, 42 aa, Artificial Sequence
  Synthetic
IADAVACAKRVVRDPQGIRAWVAWRNRCQNRDLRQYIQGCGV

SEQ ID NO: 2263 - protein, 42 aa, Artificial Sequence; identical to SEQ ID NO: 2260
  Synthetic

SEQ ID NO: 2264 - protein, 42 aa, Artificial Sequence; identical to SEQ ID NO: 2260
  Synthetic

SEQ ID NO: 2265 - protein, 42 aa, Artificial Sequence; identical to SEQ ID NO: 2260
  Synthetic

SEQ ID NO: 2266 - protein, 34 aa, Artificial Sequence
  Synthetic
LLRQVNSLADNVVKPEEGIDINAVHGLDTRSPET

SEQ ID NO: 2267 - protein, 34 aa, Artificial Sequence
  Synthetic
LADTLAKLAKNIATDRASAGKPSRAVSFVGKTRV

SEQ ID NO: 2268 - protein, 20 aa, Artificial Sequence
  Synthetic
RGCSRCCSYVGEAVQTQPGH

SEQ ID NO: 2269 - protein, 33 aa, Artificial Sequence; identical to SEQ ID NO: 1815
  Synthetic

SEQ ID NO: 2270 - protein, 32 aa, Artificial Sequence
  Synthetic
KGKELLRDYANRVLSPEEEAAAPAPVPAKRRR

SEQ ID NO: 2271 - protein, 12 aa, Artificial Sequence
  Synthetic
GKAVLNAASEAL

SEQ ID NO: 2272 - protein, 22 aa, Artificial Sequence
  Synthetic
NQFLDYLQEFLGVMNTEWIIES

SEQ ID NO: 2273 - protein, 25 aa, Artificial Sequence
  Synthetic
VLDTVTKAIETFAKVDANEARPKSQ

SEQ ID NO: 2274 - protein, 12 aa, Artificial Sequence
  Synthetic
GVPRVMSDAGRR

SEQ ID NO: 2275 - protein, 21 aa, Artificial Sequence
  Synthetic
VEKLTKALSTIRQCIISKIKK

SEQ ID NO: 2276 - protein, 16 aa, Artificial Sequence
  Synthetic
EDIFEEANRIATDLRQ

SEQ ID NO: 2277 - protein, 19 aa, Artificial Sequence
  Synthetic
KTIKSLVKAISKKRSRRSP

SEQ ID NO: 2278 - protein, 32 aa, Artificial Sequence; identical to SEQ ID NO: 2188
  Synthetic

SEQ ID NO: 2279 - protein, 32 aa, Artificial Sequence; identical to SEQ ID NO: 2188
  Synthetic

SEQ ID NO: 2280 - protein, 32 aa, Artificial Sequence; identical to SEQ ID NO: 2188
  Synthetic

SEQ ID NO: 2281 - protein, 32 aa, Artificial Sequence; identical to SEQ ID NO: 2188
  Synthetic

SEQ ID NO: 2282 - protein, 42 aa, Artificial Sequence
  Synthetic
CIKSLAADISDINYGVAAGLPGQCNVHIPYKISPSIDCKRVK

SEQ ID NO: 2283 - protein, 19 aa, Artificial Sequence
  Synthetic
KWVQKVVQAFLKRAEKQDP

SEQ ID NO: 2284 - protein, 13 aa, Artificial Sequence
  Synthetic
AVKKLLEALSHLV

SEQ ID NO: 2285 - protein, 27 aa, Artificial Sequence
  Synthetic
KLFRIYSNFLRGKLTLYTGEACRRGDR

SEQ ID NO: 2286 - protein, 36 aa, Artificial Sequence
  Synthetic
RDCAGYMRECKEKLRCSGYVCSSRWKWCVLPAPWRR

SEQ ID NO: 2287 - protein, 16 aa, Artificial Sequence
  Synthetic
KISDWWKRIWEKIKNK

SEQ ID NO: 2288 - protein, 18 aa, Artificial Sequence
  Synthetic
LQRFLELAYRVLRYLAKP

SEQ ID NO: 2289 - protein, 30 aa, Artificial Sequence
  Synthetic
TLNSFAQRLVRQWSSEGARLGLTYKEDKKR

SEQ ID NO: 2290 - protein, 25 aa, Artificial Sequence
  Synthetic
DMAQQCRDCCGGNGKCFGYQCLCNR

SEQ ID NO: 2291 - protein, 19 aa, Artificial Sequence
  Synthetic
KRMEYIAKKLDKMMEYESS

SEQ ID NO: 2292 - protein, 19 aa, Artificial Sequence
  Synthetic
NLINDGSTYFDRKKRFMSQ

SEQ ID NO: 2293 - protein, 17 aa, Artificial Sequence
  Synthetic
VQRVVEKFVKRAENQNP

SEQ ID NO: 2294 - protein, 17 aa, Artificial Sequence
  Synthetic
VQRVVEKFVKRAENQNP

SEQ ID NO: 2295 - protein, 37 aa, Artificial Sequence
  Synthetic
RKAIHELIQVMAELSPAAKTGKRKRSQMLFRGRRASQ

SEQ ID NO: 2296 - protein, 28 aa, Artificial Sequence
  Synthetic
LRNFLSDFDSLAQNVYKEYVHSMSGWID

SEQ ID NO: 2297 - protein, 18 aa, Artificial Sequence
  Synthetic
LQSFLELVHRVLRHLAQP

SEQ ID NO: 2298 - protein, 14 aa, Artificial Sequence
  Synthetic
EAVKKLLEALSHLV

SEQ ID NO: 2299 - protein, 14 aa, Artificial Sequence
  Synthetic
EAVKKLLEALSHLV

SEQ ID NO: 2300 - protein, 14 aa, Artificial Sequence
  Synthetic
EAVKKLLEALSHLV

SEQ ID NO: 2301 - protein, 14 aa, Artificial Sequence
  Synthetic
EAVKKLLEALSHLV

SEQ ID NO: 2302 - protein, 14 aa, Artificial Sequence
  Synthetic
EAVKKLLEALSHLV

SEQ ID NO: 2303 - protein, 14 aa, Artificial Sequence
  Synthetic
EAVKKLLEALSHLV

SEQ ID NO: 2304 - protein, 19 aa, Artificial Sequence
  Synthetic
KAIKNLLKAVSEKKSKRPP

SEQ ID NO: 2305 - protein, 17 aa, Artificial Sequence
  Synthetic
FLNTWITFCQSIISKLA

SEQ ID NO: 2306 - protein, 22 aa, Artificial Sequence
  Synthetic
DNVASAWNQAFDNIYEIIFRIV

SEQ ID NO: 2307 - protein, 23 aa, Artificial Sequence
  Synthetic
RGYNGCSRCCSYAGEAVQTQPGH

SEQ ID NO: 2308 - protein, 17 aa, Artificial Sequence
  Synthetic
FLNKWITFCQRIYSTMT

SEQ ID NO: 2309 - protein, 42 aa, Artificial Sequence
  Synthetic
RYGSDCAEPCKRLKCLLPSKCINGKCTCYPSIKIKNCKVQTY

SEQ ID NO: 2310 - protein, 34 aa, Artificial Sequence
  Synthetic
HNVISGLSEIAKSMSATAKPTKDRCAAYPYPDCP

SEQ ID NO: 2311 - protein, 11 aa, Artificial Sequence
  Synthetic
YDIIGNILKNF

SEQ ID NO: 2312 - protein, 28 aa, Artificial Sequence
  Synthetic
ITTCLTQLSEALTKGQPALIIAPMFRVG

SEQ ID NO: 2313 - protein, 12 aa, Artificial Sequence
  Synthetic
DNGKHWYDTGDQ

SEQ ID NO: 2314 - protein, 27 aa, Artificial Sequence
  Synthetic
FADCFYDAFSKIVDLKITIGTQWLIRS

SEQ ID NO: 2315 - protein, 35 aa, Artificial Sequence
  Synthetic
GLFRFARGYVEARTMWFDQKSGDATVEYSCYVLHY

SEQ ID NO: 2316 - protein, 22 aa, Artificial Sequence
  Synthetic
NQFLDYLQEFLGVMNTEWIIES

SEQ ID NO: 2317 - protein, 16 aa, Artificial Sequence
  Synthetic
LNKWITFCQRIFSTLT

SEQ ID NO: 2318 - protein, 13 aa, Artificial Sequence
  Synthetic
YSRGCSAITRCRS

SEQ ID NO: 2319 - protein, 11 aa, Artificial Sequence
  Synthetic
WRALDTLFENY

SEQ ID NO: 2320 - protein, 40 aa, Artificial Sequence
  Synthetic
VGNFVHGFSHVFGDDQQDNGKFYGYYAEDNGKHWYDTGDQ

SEQ ID NO: 2321 - protein, 42 aa, Artificial Sequence
  Synthetic
KAVEQVKSAFSKLQEKGVYKAMSEFDIFINYIETYMTMRMKI

SEQ ID NO: 2322 - protein, 12 aa, Artificial Sequence
  Synthetic
CGWVNRAWRGLV

SEQ ID NO: 2323 - protein, 16 aa, Artificial Sequence
  Synthetic
LNKWITFCQRIFSTLT

SEQ ID NO: 2324 - protein, 14 aa, Artificial Sequence
  Synthetic
HYGKKALQKASEKL

SEQ ID NO: 2325 - protein, 14 aa, Artificial Sequence
  Synthetic
HYGKKALQKASEKL

SEQ ID NO: 2326 - protein, 14 aa, Artificial Sequence
  Synthetic
HYGKKALQKASEKL

SEQ ID NO: 2327 - protein, 11 aa, Artificial Sequence
  Synthetic
INAISAIANHF

SEQ ID NO: 2328 - protein, 26 aa, Artificial Sequence
  Synthetic
DMAQQCRACCKGRGKCFGPQCLCGYD

SEQ ID NO: 2329 - protein, 15 aa, Artificial Sequence
  Synthetic
VQRIVQKILNKGKAN

SEQ ID NO: 2330 - protein, 37 aa, Artificial Sequence
  Synthetic
NCAKKIASGGNGMNAWVAWRNRCKGTDVHAWIRGCRL

SEQ ID NO: 2331 - protein, 14 aa, Artificial Sequence
  Synthetic
KALKALLGALTVFG

SEQ ID NO: 2332 - protein, 15 aa, Artificial Sequence
  Synthetic
ASKAFKDMVKAAHTD

SEQ ID NO: 2333 - protein, 34 aa, Artificial Sequence
  Synthetic
RACKGVFDACTPGKNECCPNRVCSDKHKWCKWKL

SEQ ID NO: 2334 - protein, 34 aa, Artificial Sequence
  Synthetic
KVEDALHTGAQAGFKLIRPVERGATPKKSEKPEK

SEQ ID NO: 2335 - protein, 11 aa, Artificial Sequence
  Synthetic
YASYGDSYDGI

SEQ ID NO: 2336 - protein, 22 aa, Artificial Sequence
  Synthetic
LTTLNDFLGRLRGIMQMKNWQG

SEQ ID NO: 2337 - protein, 42 aa, Artificial Sequence
  Synthetic
ITAAIQCAKRVVRDPQGIRAWVAWRAHCQNRDLSQYIRNCGV

SEQ ID NO: 2338 - protein, 28 aa, Artificial Sequence
  Synthetic
QYWTECCGRIGPHCSRCICPEVVCPKNG

SEQ ID NO: 2339 - protein, 20 aa, Artificial Sequence
  Synthetic
IRSLAHRWQTIIDQHGSYFQ

SEQ ID NO: 2340 - protein, 27 aa, Artificial Sequence
  Synthetic
SQCYKTCEKVVGVAAGKCMNGKCICYP

SEQ ID NO: 2341 - protein, 30 aa, Artificial Sequence
  Synthetic
FLSTVKNLATNVAGTVLDTIRCKVTGGCRP

SEQ ID NO: 2342 - protein, 18 aa, Artificial Sequence
  Synthetic
GGNCDGVMRQCKCIRQCW

SEQ ID NO: 2343 - protein, 14 aa, Artificial Sequence
  Synthetic
HYGKKALQKASEKL

SEQ ID NO: 2344 - protein, 14 aa, Artificial Sequence
  Synthetic
HYGKKALQKASEKL

SEQ ID NO: 2345 - protein, 21 aa, Artificial Sequence
  Synthetic
KAVEFLNKWITFCQSIYSTMT

SEQ ID NO: 2346 - protein, 23 aa, Artificial Sequence
  Synthetic
FSQARSCCSRLGRCCHVGKGYSG

SEQ ID NO: 2347 - protein, 35 aa, Artificial Sequence
  Synthetic
DLQSIVSQLLTRVNDNNSEAQHVRKQIFSRKFWKR

SEQ ID NO: 2348 - protein, 17 aa, Artificial Sequence
  Synthetic
MKKLLRYLNYVAEHTAV

SEQ ID NO: 2349 - protein, 17 aa, Artificial Sequence
  Synthetic
MKKLLRYLNYVAEHTAV

SEQ ID NO: 2350 - protein, 17 aa, Artificial Sequence
  Synthetic
MKKLLRYLNYVAEHTAV

SEQ ID NO: 2351 - protein, 17 aa, Artificial Sequence
  Synthetic
MKKLLRYLNYVAEHTAV

SEQ ID NO: 2352 - protein, 31 aa, Artificial Sequence
  Synthetic
EEVFKKFKKVAKSFGVPGKNLIMLSRSEPCS

SEQ ID NO: 2353 - protein, 22 aa, Artificial Sequence
  Synthetic
CARYYGNYFDYWGQGTTLTVSS

SEQ ID NO: 2354 - protein, 16 aa, Artificial Sequence
  Synthetic
SFVTRVLTTLTTIVDL

SEQ ID NO: 2355 - protein, 15 aa, Artificial Sequence
  Synthetic
VTKIATTVDQALSTS

SEQ ID NO: 2356 - protein, 32 aa, Artificial Sequence
  Synthetic
WFTMLKKLGTMALHAGKAALGAAANTISQGTQ

SEQ ID NO: 2357 - protein, 26 aa, Artificial Sequence
  Synthetic
GQCDDCCKKAGDRAGTCVYYKCKCNP

SEQ ID NO: 2358 - protein, 20 aa, Artificial Sequence
  Synthetic
ARSCCTRLGRCCHVAKGYSG

SEQ ID NO: 2359 - protein, 20 aa, Artificial Sequence
  Synthetic
ARSCCTRLGRCCHVAKGYSG

SEQ ID NO: 2360 - protein, 36 aa, Artificial Sequence
  Synthetic
SDASEIVNGASEQCAKGCSIFCTKSYVVPPGPPKLL

SEQ ID NO: 2361 - protein, 19 aa, Artificial Sequence
  Synthetic
VERVSACVDSCSNKCTKKN

SEQ ID NO: 2362 - protein, 24 aa, Artificial Sequence
  Synthetic
EDFETLLQQVARHARSECLFIFSG

SEQ ID NO: 2363 - protein, 42 aa, Artificial Sequence
  Synthetic
KAVEQVRGVFSKLQEKGVYKAMSEFDIFINYIEAYMTMKMKN

SEQ ID NO: 2364 - protein, 36 aa, Artificial Sequence
  Synthetic
ECDKAVATCFRDNLDTYKKRNIFHPTSSCVKVSTPC

SEQ ID NO: 2365 - protein, 36 aa, Artificial Sequence
  Synthetic
ECDKAVATCFRDNLDTYKKRNIFHPKSSCVKVSTPC

SEQ ID NO: 2366 - protein, 17 aa, Artificial Sequence
  Synthetic
LMDQLDEYANAVQIVGK

SEQ ID NO: 2367 - protein, 19 aa, Artificial Sequence
  Synthetic
NIQKCCSNGCGHVCKSPVF

SEQ ID NO: 2368 - protein, 23 aa, Artificial Sequence
  Synthetic
FLKRLLQEIKTCWNKILMGTKEH

SEQ ID NO: 2369 - protein, 26 aa, Artificial Sequence
  Synthetic
VGHCYGQFKDAKRCLCSVCGPDRQPP

SEQ ID NO: 2370 - protein, 23 aa, Artificial Sequence
  Synthetic
LPAIVGAAGKFLPKIFCAISKKC

SEQ ID NO: 2371 - protein, 29 aa, Artificial Sequence
  Synthetic
QEFLERMKSLLQKVSCFVLSLPIQIAFYI

SEQ ID NO: 2372 - protein, 22 aa, Artificial Sequence
  Synthetic
RHFLDYLQEFLGVMSTEWAMEV

SEQ ID NO: 2373 - protein, 20 aa, Artificial Sequence
  Synthetic
LAEQLMEKIKNLWYTKVQGY

SEQ ID NO: 2374 - protein, 20 aa, Artificial Sequence
  Synthetic
VAGVAGQVLKKIYCTISKKC

SEQ ID NO: 2375 - protein, 28 aa, Artificial Sequence
  Synthetic
KKLVEVMKDVASVCEMVRKKARMALKEY

SEQ ID NO: 2376 - protein, 35 aa, Artificial Sequence
  Synthetic
DLQSMVSQLLTRVNENNSDALHVRKQMFSRKFWKR

SEQ ID NO: 2377 - protein, 31 aa, Artificial Sequence
  Synthetic
DILDKMENAIHKAAQAGIGIAKPIEKMILPK

SEQ ID NO: 2378 - protein, 34 aa, Artificial Sequence
  Synthetic
DILDKMENAIHKAAQAGIGIAKPIENMILPKLTK

SEQ ID NO: 2379 - protein, 31 aa, Artificial Sequence; identical to SEQ ID NO: 2377
  Synthetic

SEQ ID NO: 2380 - protein, 34 aa, Artificial Sequence; identical to SEQ ID NO: 2378
  Synthetic

SEQ ID NO: 2381 - protein, 19 aa, Artificial Sequence
  Synthetic
FEQLIEKIKNLWYTRVLGY

SEQ ID NO: 2382 - protein, 20 aa, Artificial Sequence
  Synthetic
WAKYHAAVRHYVNLITRQRY

SEQ ID NO: 2383 - protein, 31 aa, Artificial Sequence
  Synthetic
AKSFVSTLGRAMENNPDDHHLYNDKDVPLDY

SEQ ID NO: 2384 - protein, 12 aa, Artificial Sequence
  Synthetic
FYGSYTGLGSSL

SEQ ID NO: 2385 - protein, 15 aa, Artificial Sequence
  Synthetic
DFLQQLTNLLRSMHK

SEQ ID NO: 2386 - protein, 21 aa, Artificial Sequence
  Synthetic
KAAEFLNKWITFCQSIYSTMT

SEQ ID NO: 2387 - protein, 33 aa, Artificial Sequence
  Synthetic
VKEAANVLESAWQMWHVNGTRCPKGVFPYDATQ

SEQ ID NO: 2388 - protein, 38 aa, Artificial Sequence
  Synthetic
QSLRRGCKRVPAQATAPFPDCCPTTLCRGRQWDRPRTL

SEQ ID NO: 2389 - protein, 31 aa, Artificial Sequence
  Synthetic
DSLYEPGKALASACQVAVEACAAWFPGPEKK

SEQ ID NO: 2390 - protein, 18 aa, Artificial Sequence
  Synthetic
KLVDSLLQVLKGKEGTAS

SEQ ID NO: 2391 - protein, 19 aa, Artificial Sequence
  Synthetic
EAIGKAAGKCMNGKCKCYP

SEQ ID NO: 2392 - protein, 28 aa, Artificial Sequence
  Synthetic
EQYSSLMEGLAGDLLQWMLHATRRERPQ

SEQ ID NO: 2393 - protein, 11 aa, Artificial Sequence
  Synthetic
INAISAIANHL

SEQ ID NO: 2394 - protein, 17 aa, Artificial Sequence
  Synthetic
FRRLCRNIKEVIKKNCY

SEQ ID NO: 2395 - protein, 36 aa, Artificial Sequence
  Synthetic
ECDRVAAECLRRSLSTYKYGYMFYPDSRCRGPSETC

SEQ ID NO: 2396 - protein, 36 aa, Artificial Sequence
  Synthetic
ECDRVAAECLRRSLSTYKNEYMFYPDSRCREPSETC

SEQ ID NO: 2397 - protein, 36 aa, Artificial Sequence; identical to SEQ ID NO: 2395
  Synthetic

SEQ ID NO: 2398 - protein, 17 aa, Artificial Sequence
  Synthetic
RDWDRVAERCPTAATWW

SEQ ID NO: 2399 - protein, 34 aa, Artificial Sequence
  Synthetic
NKLERVFRSLAYRVELLEANTEPMTEKKSVSVSE

SEQ ID NO: 2400 - protein, 21 aa, Artificial Sequence
  Synthetic
DDMNDYCTGISSDCPRNPWKD

SEQ ID NO: 2401 - protein, 20 aa, Artificial Sequence
  Synthetic
ARSCCTRLGRCCHVAKGYSG

SEQ ID NO: 2402 - protein, 33 aa, Artificial Sequence
  Synthetic
FGKRGLSDLDGLDELFDGEISKADRDFLRELMR

SEQ ID NO: 2403 - protein, 23 aa, Artificial Sequence
  Synthetic
EVANPVKGFFESPPTVGHNLVAD

SEQ ID NO: 2404 - protein, 20 aa, Artificial Sequence
  Synthetic
WAKYHAAVRHYVNLITRQRY

SEQ ID NO: 2405 - protein, 19 aa, Artificial Sequence
  Synthetic
SAMERLNNWLNTFKHQPHH

SEQ ID NO: 2406 - protein, 21 aa, Artificial Sequence
  Synthetic
KAVEFLNKWITFCQSIYSTMT

SEQ ID NO: 2407 - protein, 21 aa, Artificial Sequence
  Synthetic
KAVEFLNKWITFCQSIYSTLT

SEQ ID NO: 2408 - protein, 12 aa, Artificial Sequence
  Synthetic
DNGKHWYDTGDQ

SEQ ID NO: 2409 - protein, 40 aa, Artificial Sequence
  Synthetic
YYDTFTKLCNTFQHTGCGGNSNHFKEWNDCFFTCGSGFEW

SEQ ID NO: 2410 - protein, 11 aa, Artificial Sequence
  Synthetic
TCVSSIVRHAS

SEQ ID NO: 2411 - protein, 12 aa, Artificial Sequence
  Synthetic
FFHRISHFLESA

SEQ ID NO: 2412 - protein, 24 aa, Artificial Sequence
  Synthetic
LFNDLEHVCDDCYNLYRTSYVASA

SEQ ID NO: 2413 - protein, 24 aa, Artificial Sequence
  Synthetic
YKSGARIGRNCFCLLKGVIYKREN

SEQ ID NO: 2414 - protein, 27 aa, Artificial Sequence
  Synthetic
DLTRALHDLVKALKKAYRTLDIAAVEH

SEQ ID NO: 2415 - protein, 20 aa, Artificial Sequence
  Synthetic
LDHMHDLLSTLQKLKFANNK

SEQ ID NO: 2416 - protein, 19 aa, Artificial Sequence
  Synthetic
EAIGKSAGKCMNGKCKCYP

SEQ ID NO: 2417 - protein, 26 aa, Artificial Sequence
  Synthetic
INGLYNIVKHVNTLVFKRFNEGLTYS

SEQ ID NO: 2418 - protein, 15 aa, Artificial Sequence
  Synthetic
LKTLFTTIWKFIKKD

SEQ ID NO: 2419 - protein, 30 aa, Artificial Sequence
  Synthetic
FLSTVKNLATNVAGTVIDTLKCKVTGGCRS

SEQ ID NO: 2420 - protein, 26 aa, Artificial Sequence
  Synthetic
GQCDECCKKAGDRAGTCVYYKCKCNP

SEQ ID NO: 2421 - protein, 26 aa, Artificial Sequence
  Synthetic
GQCDECCKKAGDRAGTCVYYKCKCNP

SEQ ID NO: 2422 - protein, 16 aa, Artificial Sequence
  Synthetic
DKIKDAATGFVTGIQS

SEQ ID NO: 2423 - protein, 32 aa, Artificial Sequence
  Synthetic
VCQRFCKNLTYIFNNRTYTHKCCNSDFCNFRL

SEQ ID NO: 2424 - protein, 23 aa, Artificial Sequence
  Synthetic
LPAIVGAAAKFLPKIFCVISKKC

SEQ ID NO: 2425 - protein, 23 aa, Artificial Sequence
  Synthetic
FSQARSYCSRLGRCCHVGKGYSG

SEQ ID NO: 2426 - protein, 23 aa, Artificial Sequence
  Synthetic
WSKIKEAAKTAGKAAMGFVNEMV

SEQ ID NO: 2427 - protein, 30 aa, Artificial Sequence
  Synthetic
GDAKAAWKELNKNFNSEAQHQLEKLGLPHA

SEQ ID NO: 2428 - protein, 26 aa, Artificial Sequence
  Synthetic
GQCDECCKKAGDRAGTCVYYKCKCNP

SEQ ID NO: 2429 - protein, 16 aa, Artificial Sequence
  Synthetic
DKFKDAATGFVTGIQS

SEQ ID NO: 2430 - protein, 31 aa, Artificial Sequence
  Synthetic
HTLLKILSTFLYQLFSSSIVVALFTLVPYSI

SEQ ID NO: 2431 - protein, 34 aa, Artificial Sequence
  Synthetic
HTLLKILSTFLYQLFSSSIVVAIFTLIPYLIFGA

SEQ ID NO: 2432 - protein, 41 aa, Artificial Sequence
  Synthetic
SVCDNMDNVFRGQEMKFDMGLCSNACARFCNDGAVIQSVEA

SEQ ID NO: 2433 - protein, 25 aa, Artificial Sequence
  Synthetic
SPIKRIIRDVKEIVRARNGLQFSLF

SEQ ID NO: 2434 - protein, 18 aa, Artificial Sequence
  Synthetic
LQSFLELVHRVLRHLAQP

SEQ ID NO: 2435 - protein, 18 aa, Artificial Sequence
  Synthetic
KTADTFATKLVQCVKDNL

SEQ ID NO: 2436 - protein, 42 aa, Artificial Sequence
  Synthetic
ITQAIQCAKRVVRDPQGIRAWVAWQRHCQNRDLSGYIRNCGV

SEQ ID NO: 2437 - protein, 11 aa, Artificial Sequence
  Synthetic
IDEVEDWIASY

SEQ ID NO: 2438 - protein, 42 aa, Artificial Sequence
  Synthetic
KAVEQVKSVFSKLQERGVYKAMSEFDIFINYIETYTTMKMKN

SEQ ID NO: 2439 - protein, 13 aa, Artificial Sequence
  Synthetic
GGRCVNTICNCRN

SEQ ID NO: 2440 - protein, 15 aa, Artificial Sequence
  Synthetic
DFLHELTNFVRYLQK

SEQ ID NO: 2441 - protein, 15 aa, Artificial Sequence
  Synthetic
DFLHELTNFVRYLQK

SEQ ID NO: 2442 - protein, 15 aa, Artificial Sequence
  Synthetic
DFLHELTNFVRYLQK

SEQ ID NO: 2443 - protein, 15 aa, Artificial Sequence
  Synthetic
DFLHELTNFVRYLQK

SEQ ID NO: 2444 - protein, 29 aa, Artificial Sequence
  Synthetic
CNDMCSRMARGCQHFTFCTRPGQCCCWFT

SEQ ID NO: 2445 - protein, 41 aa, Artificial Sequence
  Synthetic
DYYGDLAARLGYFPSSIVREDQTLKPGKVDVKTDKWDFYCQ

SEQ ID NO: 2446 - protein, 14 aa, Artificial Sequence
  Synthetic
EKFKRIANSFLQKN

SEQ ID NO: 2447 - protein, 21 aa, Artificial Sequence
  Synthetic
DFINNMYTVFEEFTEMITNLP

SEQ ID NO: 2448 - protein, 16 aa, Artificial Sequence
  Synthetic
VDEVFDEVVQIFDKEG

SEQ ID NO: 2449 - protein, 30 aa, Artificial Sequence
  Synthetic
GLAGAISSVLDKLKQSQLIKNYAKKLGYPR

SEQ ID NO: 2450 - protein, 20 aa, Artificial Sequence
  Synthetic
KVISKGASMCKVLFDKKKQE

SEQ ID NO: 2451 - protein, 30 aa, Artificial Sequence
  Synthetic
MSSVYGNGKSILRGILRNGVCCGYKLCHPC

SEQ ID NO: 2452 - protein, 34 aa, Artificial Sequence
  Synthetic
CAEPCGNFCHKASDKPGGRRVDPNASCKTGYVYW

SEQ ID NO: 2453 - protein, 34 aa, Artificial Sequence; identical to SEQ ID NO: 2452
  Synthetic

SEQ ID NO: 2454 - protein, 30 aa, Artificial Sequence
  Synthetic
WTEYLKWYNHICDFTLPFICKFLAEPDDPE

SEQ ID NO: 2455 - protein, 40 aa, Artificial Sequence
  Synthetic
YYDTFTKLCNTFQHTGCGGNSNHFKDWNDCFFTCGNGFET

SEQ ID NO: 2456 - protein, 28 aa, Artificial Sequence
  Synthetic
KHAHSMITSMLTFVSSVMNFGRSFVKDQ

SEQ ID NO: 2457 - protein, 28 aa, Artificial Sequence
  Synthetic
KHAHSMITSMLTFVSSVMNFGRSFVKDQ

SEQ ID NO: 2458 - protein, 22 aa, Artificial Sequence
  Synthetic
IKRFSTLWRDIWQVASNFRHYE

SEQ ID NO: 2459 - protein, 21 aa, Artificial Sequence
  Synthetic
LEDLEDLVTRAIYEFDLDELL

SEQ ID NO: 2460 - protein, 19 aa, Artificial Sequence
  Synthetic
KTIKNLMKAFSQKRSKRAP

SEQ ID NO: 2461 - protein, 31 aa, Artificial Sequence
  Synthetic
AKGRELLKDYANRVINGGPEEEAAVPAERRR

SEQ ID NO: 2462 - protein, 29 aa, Artificial Sequence
  Synthetic
KQCLKPCKDLYGPHAGAKCMNGKCKCYNN

SEQ ID NO: 2463 - protein, 29 aa, Artificial Sequence
  Synthetic
KQCLKPCKDLYGPHAGAKCMNGKCKCYNN

SEQ ID NO: 2464 - protein, 17 aa, Artificial Sequence
  Synthetic
LFDVIKKVASVIGLASQ

SEQ ID NO: 2465 - protein, 16 aa, Artificial Sequence
  Synthetic
LARRMNEVFKEMLRPQ

SEQ ID NO: 2466 - protein, 25 aa, Artificial Sequence
  Synthetic
GDCCRYGERCISTGVNYYCRPDFGP

SEQ ID NO: 2467 - protein, 15 aa, Artificial Sequence
  Synthetic
YCRFGNTIYGLCCRR

SEQ ID NO: 2468 - protein, 24 aa, Artificial Sequence
  Synthetic
DDYTKCCKSFDAFITCGFLLSKES

SEQ ID NO: 2469 - protein, 13 aa, Artificial Sequence
  Synthetic
KWVQEYINYLELK

SEQ ID NO: 2470 - protein, 26 aa, Artificial Sequence
  Synthetic
EDMSELIERAYTVAYERVYPPTSSKK

SEQ ID NO: 2471 - protein, 25 aa, Artificial Sequence
  Synthetic
GDCCRYGERCISTGVNYYCKPDFGP

SEQ ID NO: 2472 - protein, 16 aa, Artificial Sequence
  Synthetic
DKLKDAATGFVTGIQS

SEQ ID NO: 2473 - protein, 15 aa, Artificial Sequence
  Synthetic
KYIEKVVDKAKTVVG

SEQ ID NO: 2474 - protein, 19 aa, Artificial Sequence
  Synthetic
QAIGKAAGKCMNGKCKCYP

SEQ ID NO: 2475 - protein, 14 aa, Artificial Sequence
  Synthetic
KCCRTIQTCGNTTD

SEQ ID NO: 2476 - protein, 28 aa, Artificial Sequence
  Synthetic
SSIIYNIGKFFSYLLSHQSSSLLQRESL

SEQ ID NO: 2477 - protein, 32 aa, Artificial Sequence
  Synthetic
CSLLQEAFQRFSTCAGTSVFPQGQKSLGSITR

SEQ ID NO: 2478 - protein, 19 aa, Artificial Sequence
  Synthetic
NVYSRGCTTINRCRRVQNP

SEQ ID NO: 2479 - protein, 40 aa, Artificial Sequence; identical to SEQ ID NO: 2259
  Synthetic

SEQ ID NO: 2480 - protein, 20 aa, Artificial Sequence
  Synthetic
NKIETIAKNALRGLRDVTHL

SEQ ID NO: 2481 - protein, 24 aa, Artificial Sequence
  Synthetic
LSTLQTAVTQLANSLGTVVGQISG

SEQ ID NO: 2482 - protein, 14 aa, Artificial Sequence
  Synthetic
EKFTRIANSFLQKN

SEQ ID NO: 2483 - protein, 32 aa, Artificial Sequence
  Synthetic
FGKRGLSDLSDLDELFDGEITKADLDLLREIM

SEQ ID NO: 2484 - protein, 27 aa, Artificial Sequence
  Synthetic
QLWKGIGKCIKTDDHKLLCLCKYECIV

SEQ ID NO: 2485 - protein, 35 aa, Artificial Sequence
  Synthetic
ACQGYMRKCGRDKPPCCKKLECSKTWRWCVWNPWE

SEQ ID NO: 2486 - protein, 35 aa, Artificial Sequence
  Synthetic
RRCKYVLESAARAAQVAASVNAAARAGDRVAARAS

SEQ ID NO: 2487 - protein, 22 aa, Artificial Sequence
  Synthetic
NWGEGIMGICKKRYGSPILCCR

SEQ ID NO: 2488 - protein, 41 aa, Artificial Sequence
  Synthetic
LKQILQRWGEECRACAEKSDYVNLIRELAPKYVEIYPQTEL

SEQ ID NO: 2489 - protein, 11 aa, Artificial Sequence
  Synthetic
MTQGQHFLQKV

SEQ ID NO: 2490 - protein, 28 aa, Artificial Sequence
  Synthetic
IKRLASTAFSMANHIEHTFRKNSNKKDD

SEQ ID NO: 2491 - protein, 20 aa, Artificial Sequence
  Synthetic
RLHNVVGTCYEGKGKCCHKN

SEQ ID NO: 2492 - protein, 42 aa, Artificial Sequence
  Synthetic
CLRACNSCCSRCNCVPPGTSGNTHLCPCYASITTHGGRLKCP

SEQ ID NO: 2493 - protein, 14 aa, Artificial Sequence
  Synthetic
NDLCSHIDEAFRYL

SEQ ID NO: 2494 - protein, 36 aa, Artificial Sequence
  Synthetic
RKAVHELIQVMAELSPAAKIGKRKRSQMFRGRRASQ

SEQ ID NO: 2495 - protein, 19 aa, Artificial Sequence
  Synthetic
FEQLIEKIKNMWYTRVLGY

SEQ ID NO: 2496 - protein, 14 aa, Artificial Sequence
  Synthetic
FADLFGKAVDFIKS

SEQ ID NO: 2497 - protein, 41 aa, Artificial Sequence; identical to SEQ ID NO: 2432
  Synthetic

SEQ ID NO: 2498 - protein, 22 aa, Artificial Sequence
  Synthetic
ATKAGRRVINARRRKGRAKLTV

SEQ ID NO: 2499 - protein, 36 aa, Artificial Sequence
  Synthetic
ASQALKRGCKSVPGPAGKRFPECCPTTLCRGKQWGQ

SEQ ID NO: 2500 - protein, 24 aa, Artificial Sequence
  Synthetic
RGCRRCCSYLGEAMDAETQADPHN

SEQ ID NO: 2501 - protein, 42 aa, Artificial Sequence
  Synthetic
KAVEQVKSAFSKLQEKGVYKAMSEFDIFINYIEAYMTTKMKN

SEQ ID NO: 2502 - protein, 35 aa, Artificial Sequence
  Synthetic
TCMKDFVKKGGVMNKPISCECDNLGYEHLCRCNFS

SEQ ID NO: 2503 - protein, 29 aa, Artificial Sequence
  Synthetic
VSEVQNCMRSLNNLMMLTGERGGFLEKKW

SEQ ID NO: 2504 - protein, 17 aa, Artificial Sequence
  Synthetic
FQRFLETAYRALRHLAR

SEQ ID NO: 2505 - protein, 36 aa, Artificial Sequence; identical to SEQ ID NO: 2494
  Synthetic

SEQ ID NO: 2506 - protein, 36 aa, Artificial Sequence
  Synthetic
RKAVHELIQVMAELSPAAKIGKRKRSQTFRGRRASQ

SEQ ID NO: 2507 - protein, 36 aa, Artificial Sequence; identical to SEQ ID NO: 2494
  Synthetic

SEQ ID NO: 2508 - protein, 36 aa, Artificial Sequence; identical to SEQ ID NO: 2494
  Synthetic

SEQ ID NO: 2509 - protein, 28 aa, Artificial Sequence
  Synthetic
ITDALKGAAKTVAAELLRKAHCKLTNSC

SEQ ID NO: 2510 - protein, 42 aa, Artificial Sequence; identical to SEQ ID NO: 2321
  Synthetic

SEQ ID NO: 2511 - protein, 19 aa, Artificial Sequence
  Synthetic
VDQVIEKMKNLCYKNFVGY

SEQ ID NO: 2512 - protein, 22 aa, Artificial Sequence
  Synthetic
CSRGMRDCCTSCLLYSNKCRRY

SEQ ID NO: 2513 - protein, 24 aa, Artificial Sequence
  Synthetic
RHLARTLLTAAREPRPAPPSSNKV

SEQ ID NO: 2514 - protein, 30 aa, Artificial Sequence
  Synthetic
QNLHTIITRICYRVRTSQTWPLFPLACASM

SEQ ID NO: 2515 - protein, 15 aa, Artificial Sequence
  Synthetic
ITEFLNKWITFCQSI

SEQ ID NO: 2516 - protein, 25 aa, Artificial Sequence
  Synthetic
QECTDCCKKYGHNGGTCMFFKCKCA

SEQ ID NO: 2517 - protein, 22 aa, Artificial Sequence
  Synthetic
GMATKAGTALGKVAKAVIGAAL

SEQ ID NO: 2518 - protein, 21 aa, Artificial Sequence
  Synthetic
GLLSKVLGVGKKVLCGVSGLC

SEQ ID NO: 2519 - protein, 21 aa, Artificial Sequence
  Synthetic
DDMNDYCTGISSDCPRNPYKD

SEQ ID NO: 2520 - protein, 25 aa, Artificial Sequence
  Synthetic
QECTDCCKKYGHNGGTCMFFKCKCA

SEQ ID NO: 2521 - protein, 42 aa, Artificial Sequence
  Synthetic
IADAVTCAKRVVRDPQGIRAWVAWRNHCQNRDVSQYVQGCGV

SEQ ID NO: 2522 - protein, 42 aa, Artificial Sequence; identical to SEQ ID NO: 2521
  Synthetic

SEQ ID NO: 2523 - protein, 42 aa, Artificial Sequence; identical to SEQ ID NO: 2521
  Synthetic

SEQ ID NO: 2524 - protein, 19 aa, Artificial Sequence
  Synthetic
WDYIAHDLLHKVKSISTCK

SEQ ID NO: 2525 - protein, 20 aa, Artificial Sequence
  Synthetic
SRLDSFIQKAISKLRSSAAN

SEQ ID NO: 2526 - protein, 30 aa, Artificial Sequence
  Synthetic
AKWLQRLLRHVQSKSLSSTPQAPVSKRRAA

SEQ ID NO: 2527 - protein, 19 aa, Artificial Sequence
  Synthetic
IKGLLGSVTEAKNGYRTYK

SEQ ID NO: 2528 - protein, 36 aa, Artificial Sequence
  Synthetic
ARLGRQVDSMWAEQKQMELESILVALLQKHSRNSQG

SEQ ID NO: 2529 - protein, 42 aa, Artificial Sequence
  Synthetic
GLYRNLSSMANKTCSMNEIKKSTLKDFLERLKVIMQKKYYRH

SEQ ID NO: 2530 - protein, 37 aa, Artificial Sequence
  Synthetic
KAVNELFKVMNGDLSPKSNLRKRKRSQSTFHGRRASI

SEQ ID NO: 2531 - protein, 12 aa, Artificial Sequence
  Synthetic
CGWVNRAWRGLV

SEQ ID NO: 2532 - protein, 12 aa, Artificial Sequence
  Synthetic
CGWVNRAWRGLV

SEQ ID NO: 2533 - protein, 12 aa, Artificial Sequence
  Synthetic
CGWVNRAWRGLV

SEQ ID NO: 2534 - protein, 26 aa, Artificial Sequence
  Synthetic
WAQSLISLFQALRHDLMRSSSPAVSS

SEQ ID NO: 2535 - protein, 34 aa, Artificial Sequence
  Synthetic
CAEPCGNFCHKASDKPGGRRVDPNASCQTGYVYW

SEQ ID NO: 2536 - protein, 34 aa, Artificial Sequence; identical to SEQ ID NO: 2535
  Synthetic

SEQ ID NO: 2537 - protein, 34 aa, Artificial Sequence; identical to SEQ ID NO: 2535
  Synthetic

SEQ ID NO: 2538 - protein, 34 aa, Artificial Sequence; identical to SEQ ID NO: 2535
  Synthetic

SEQ ID NO: 2539 - protein, 35 aa, Artificial Sequence
  Synthetic
LAKVANTLISDISELKDKVQNVSGYTISSALQNIG

SEQ ID NO: 2540 - protein, 12 aa, Artificial Sequence
  Synthetic
IYGSYSGVGSSL

SEQ ID NO: 2541 - protein, 12 aa, Artificial Sequence
  Synthetic
IYGSYSGVGSSL

SEQ ID NO: 2542 - protein, 38 aa, Artificial Sequence
  Synthetic
RECTKLLGGCTKDSECCPHLGCRKKWPYHCGWDGTFGK

SEQ ID NO: 2543 - protein, 14 aa, Artificial Sequence
  Synthetic
WYEWINRCSNLLED

SEQ ID NO: 2544 - protein, 23 aa, Artificial Sequence
  Synthetic
IYTMCEIASDACQNWFPTSVEKK

SEQ ID NO: 2545 - protein, 28 aa, Artificial Sequence
  Synthetic
SQLLKVLHKIWTQVPCHLNSDGTNALHF

SEQ ID NO: 2546 - protein, 35 aa, Artificial Sequence
  Synthetic
SVFKEYAGSMGESCGGLWLAILLLLASIAAGLSLS

SEQ ID NO: 2547 - protein, 12 aa, Artificial Sequence
  Synthetic
FYGSYSGVGSSL

SEQ ID NO: 2548 - protein, 21 aa, Artificial Sequence
  Synthetic
MGGLAGDLLRILHATSRGRPQ

SEQ ID NO: 2549 - protein, 29 aa, Artificial Sequence
  Synthetic
HLIRAIRTVMTFPLIAINTIVIVYNLVLG

SEQ ID NO: 2550 - protein, 14 aa, Artificial Sequence
  Synthetic
IGHLIKTALGFLGL

SEQ ID NO: 2551 - protein, 11 aa, Artificial Sequence
  Synthetic
ELVSGIVEGVK

SEQ ID NO: 2552 - protein, 11 aa, Artificial Sequence
  Synthetic
ELVSGIVEGVK

SEQ ID NO: 2553 - protein, 11 aa, Artificial Sequence
  Synthetic
ELVSGIVEGVK

SEQ ID NO: 2554 - protein, 11 aa, Artificial Sequence
  Synthetic
ELVSGIVEGVK

SEQ ID NO: 2555 - protein, 26 aa, Artificial Sequence
  Synthetic
CKAAGKPCSRIAYNCCTGSCRSGKCG

SEQ ID NO: 2556 - protein, 36 aa, Artificial Sequence; identical to SEQ ID NO: 2494
  Synthetic

SEQ ID NO: 2557 - protein, 35 aa, Artificial Sequence
  Synthetic
ECDKAVATCFRDNLDTYNKKQQFNTGIFCSKAKAC

SEQ ID NO: 2558 - protein, 32 aa, Artificial Sequence
  Synthetic
FIKGAKNIGKEVGMDVIRTGIDVAGCKIKGEC

SEQ ID NO: 2559 - protein, 25 aa, Artificial Sequence
  Synthetic
ADCCRYGERCISTGVNYYCRPDFGP

SEQ ID NO: 2560 - protein, 21 aa, Artificial Sequence
  Synthetic
KAVEFLNKWITFCQRIYSTMT

SEQ ID NO: 2561 - protein, 24 aa, Artificial Sequence
  Synthetic
KGFNDLVDNINKAFSNLKPENAKQ

SEQ ID NO: 2562 - protein, 33 aa, Artificial Sequence
  Synthetic
FYGECVECLNSGERCWRNSECCSGYCRWFTCQD

SEQ ID NO: 2563 - protein, 34 aa, Artificial Sequence
  Synthetic
GKEYDSCIKEGSVFSKYWCPVTPNYDQDRAWRYC

SEQ ID NO: 2564 - protein, 12 aa, Artificial Sequence
  Synthetic
GQAVLNSASEAL

SEQ ID NO: 2565 - protein, 19 aa, Artificial Sequence
  Synthetic
NPWTEACHEIRSCFSCARV

SEQ ID NO: 2566 - protein, 36 aa, Artificial Sequence
  Synthetic
ECDRVAAECLRRSLSTYKYGYMFYLDSRCKGPSEQC

SEQ ID NO: 2567 - protein, 32 aa, Artificial Sequence
  Synthetic
LLDSLKGFAATAGKGVLQSLLSTASCKLAKTC

SEQ ID NO: 2568 - protein, 38 aa, Artificial Sequence
  Synthetic
RACREWLGGCSKDADCCAHLECRKKWPYHCVWDWTVRK

SEQ ID NO: 2569 - protein, 27 aa, Artificial Sequence
  Synthetic
MLDGLNDYCTGVTSDCPRNPYKGKEDD

SEQ ID NO: 2570 - protein, 17 aa, Artificial Sequence
  Synthetic
KWIQEYLEKALNKKVKT

SEQ ID NO: 2571 - protein, 18 aa, Artificial Sequence
  Synthetic
LQSFLEVAYRALRHFTKP

SEQ ID NO: 2572 - protein, 37 aa, Artificial Sequence
  Synthetic
GRGCKGFGDSCTPGKNECCPNHACSNKHKWCKVYLGK

SEQ ID NO: 2573 - protein, 15 aa, Artificial Sequence
  Synthetic
ILGIITSLLKSLGKK

SEQ ID NO: 2574 - protein, 19 aa, Artificial Sequence
  Synthetic
RACQQFLKRCHLASFALPL

SEQ ID NO: 2575 - protein, 35 aa, Artificial Sequence
  Synthetic
RLGRQVDSMWADHRQMSLESLLAALLQKHSRDSQG

SEQ ID NO: 2576 - protein, 29 aa, Artificial Sequence
  Synthetic
SLADQAANKWGRSGRDPNHFRPAGLPEKY

SEQ ID NO: 2577 - protein, 27 aa, Artificial Sequence
  Synthetic
EHIQHLFDSMLRRLEAFIAAHGGCTKY

SEQ ID NO: 2578 - protein, 25 aa, Artificial Sequence
  Synthetic
CDSAKKILDEVEKLAEAEGVTGKTR

SEQ ID NO: 2579 - protein, 33 aa, Artificial Sequence
  Synthetic
DRASKVIQEAKNLPPRCNQGPPCNIPGTIGYYW

SEQ ID NO: 2580 - protein, 17 aa, Artificial Sequence
  Synthetic
GDALYNEIKTWPHWRQN

SEQ ID NO: 2581 - protein, 31 aa, Artificial Sequence
  Synthetic
FDKIREFIQYLHEIAEEVGIDDNQMSNIKIT

SEQ ID NO: 2582 - protein, 28 aa, Artificial Sequence
  Synthetic
SSVNDIGDDWKATRVGINIFTRLRTQKE

SEQ ID NO: 2583 - protein, 17 aa, Artificial Sequence
  Synthetic
FLNKWITFCQSIYSTMT

SEQ ID NO: 2584 - protein, 22 aa, Artificial Sequence
  Synthetic
TIVEFLNRWITFCQSIISASSS

SEQ ID NO: 2585 - protein, 22 aa, Artificial Sequence
  Synthetic
TIVEFLNRWITFCQSIISASSS

SEQ ID NO: 2586 - protein, 22 aa, Artificial Sequence
  Synthetic
TIVEFLNRWITFCQSIISASSS

SEQ ID NO: 2587 - protein, 33 aa, Artificial Sequence
  Synthetic
SWLSTVLTTLYSMWLSFPLTHKVKPDLVLCNGP

SEQ ID NO: 2588 - protein, 17 aa, Artificial Sequence
  Synthetic
FLNKWITFCQSIYSTMT

SEQ ID NO: 2589 - protein, 17 aa, Artificial Sequence
  Synthetic
FLNKWITFCQSIYSTMT

SEQ ID NO: 2590 - protein, 20 aa, Artificial Sequence
  Synthetic
IDVITDALTRAEECAKRGSN

SEQ ID NO: 2591 - protein, 26 aa, Artificial Sequence
  Synthetic
WIAYCNNIMSCCRKDTDFVLPQTKGI

SEQ ID NO: 2592 - protein, 32 aa, Artificial Sequence
  Synthetic
LISGLKSVGKEVGMDVVRTGIDIAGCKIKGEC

SEQ ID NO: 2593 - protein, 30 aa, Artificial Sequence
  Synthetic
VMSSCKTIVQTLLNNSTGTFIAPPSKPSSL

SEQ ID NO: 2594 - protein, 14 aa, Artificial Sequence
  Synthetic
KWVQKYISDLKLNA

SEQ ID NO: 2595 - protein, 20 aa, Artificial Sequence
  Synthetic
SIAKTLAKSVSHVLCISKTQ

SEQ ID NO: 2596 - protein, 38 aa, Artificial Sequence
  Synthetic
NGAVSGYCQWLGKYGNACWCINLPDKVPIRIPGACRGR

SEQ ID NO: 2597 - protein, 12 aa, Artificial Sequence
  Synthetic
CGWVSRAWRGLV

SEQ ID NO: 2598 - protein, 19 aa, Artificial Sequence
  Synthetic
ISDILRIASTALQKLALQC

SEQ ID NO: 2599 - protein, 24 aa, Artificial Sequence
  Synthetic
RRVKQFLDYLQEFLTVINTEWTME

SEQ ID NO: 2600 - protein, 31 aa, Artificial Sequence
  Synthetic
RNAREILQRLETIAQDPRMCEICAFAACAGC

SEQ ID NO: 2601 - protein, 19 aa, Artificial Sequence
  Synthetic
KTADTFATKLVQCVKDNLI

SEQ ID NO: 2602 - protein, 17 aa, Artificial Sequence
  Synthetic
LFDIIKKVASVVGLASQ

SEQ ID NO: 2603 - protein, 26 aa, Artificial Sequence
  Synthetic
SQFHQLVNRCIHGVQAARPGFGRWRG

SEQ ID NO: 2604 - protein, 35 aa, Artificial Sequence
  Synthetic
LTQAFKDMVKVVNQVLNSDTATYNAIFDKYFLPEH

SEQ ID NO: 2605 - protein, 19 aa, Artificial Sequence
  Synthetic
TSLKDFLESLKSIMQMDYS

SEQ ID NO: 2606 - protein, 14 aa, Artificial Sequence
  Synthetic
IQFYKKIIANGYAK

SEQ ID NO: 2607 - protein, 12 aa, Artificial Sequence
  Synthetic
CGWVGRAWKGLV

SEQ ID NO: 2608 - protein, 21 aa, Artificial Sequence
  Synthetic
EEIHKVIKQAIEWLKELDLDL

SEQ ID NO: 2609 - protein, 35 aa, Artificial Sequence
  Synthetic
RMVNDFYKAFRDLDRCQEYCNWRVERDGVFGYNDK

SEQ ID NO: 2610 - protein, 23 aa, Artificial Sequence
  Synthetic
MGLCSNACARFCNDGEVIQSVEA

SEQ ID NO: 2611 - protein, 23 aa, Artificial Sequence
  Synthetic
MGLCSNACARFCNDGEVIQSVEA

SEQ ID NO: 2612 - protein, 37 aa, Artificial Sequence
  Synthetic
KLMELGHKIMRNLENTVKETIKYLKSLFSHAFEVVKT

SEQ ID NO: 2613 - protein, 28 aa, Artificial Sequence
  Synthetic
FISTVKNLATNVAGTVIDTIKCKVTGGC

SEQ ID NO: 2614 - protein, 42 aa, Artificial Sequence
  Synthetic
IADAVTCAKRVVRDPQGIRAWVAWRNHCHNRDVSQYVQGCGV

SEQ ID NO: 2615 - protein, 35 aa, Artificial Sequence
  Synthetic
EWEDFIQNMINFVNKIFELYPHLNTKVHLVGNSAA

SEQ ID NO: 2616 - protein, 17 aa, Artificial Sequence
  Synthetic
LESILQGFPRMKPSADA

SEQ ID NO: 2617 - protein, 36 aa, Artificial Sequence
  Synthetic
RGCRGFGDSCTPGKNECCPNHACSNKHKWCKVYLGK

SEQ ID NO: 2618 - protein, 36 aa, Artificial Sequence
  Synthetic
SKGGKCLRRCSQIVPTDIIGVCADGVPCCKSRQSTG

SEQ ID NO: 2619 - protein, 17 aa, Artificial Sequence
  Synthetic
VGKAAGKCMNGKCKCYT

SEQ ID NO: 2620 - protein, 28 aa, Artificial Sequence
  Synthetic
VTTFEDFIKNLKGFLFDIPFDCWKPVQK

SEQ ID NO: 2621 - protein, 34 aa, Artificial Sequence
  Synthetic
RLGRQVDGVWTDQQQMALESTLVSLLQERRNSQG

SEQ ID NO: 2622 - protein, 20 aa, Artificial Sequence
  Synthetic
CKGLGKSMESCQGDTCKCKA

SEQ ID NO: 2623 - protein, 18 aa, Artificial Sequence
  Synthetic
LQRLLELVYRVLRHLAEP

SEQ ID NO: 2624 - protein, 15 aa, Artificial Sequence
  Synthetic
DFLQQLTNFVRYLQK

SEQ ID NO: 2625 - protein, 22 aa, Artificial Sequence
  Synthetic
WFDPVKRCCSRYCYICIPCCPN

SEQ ID NO: 2626 - protein, 22 aa, Artificial Sequence
  Synthetic
WFDPVKRCCSRYCYICIPCCPN

SEQ ID NO: 2627 - protein, 14 aa, Artificial Sequence
  Synthetic
LKEFAGGVVTGVQS

SEQ ID NO: 2628 - protein, 14 aa, Artificial Sequence
  Synthetic
LKEFAGGVVTGVQS

SEQ ID NO: 2629 - protein, 41 aa, Artificial Sequence
  Synthetic
EFMQRALQDLRKTAYSLDARTETLLLQAERRALCACWPAGR

SEQ ID NO: 2630 - protein, 36 aa, Artificial Sequence
  Synthetic
RGCKGFGDSCTPGKNECCPNYACSSKHKWCKVLLGK

SEQ ID NO: 2631 - protein, 36 aa, Artificial Sequence
  Synthetic
RGCKGFGDSCTPGKNECCPNYACSSKHKWCKVNLGK

SEQ ID NO: 2632 - protein, 36 aa, Artificial Sequence
  Synthetic
RGCKGFGDSCTPGKNECCPNHACSNKHKWCKVYLGK

SEQ ID NO: 2633 - protein, 36 aa, Artificial Sequence; identical to SEQ ID NO: 2632
  Synthetic

SEQ ID NO: 2634 - protein, 36 aa, Artificial Sequence; identical to SEQ ID NO: 2632
  Synthetic

SEQ ID NO: 2635 - protein, 36 aa, Artificial Sequence; identical to SEQ ID NO: 2632
  Synthetic

SEQ ID NO: 2636 - protein, 36 aa, Artificial Sequence
  Synthetic
RGCKGFGDSCTPGKNECCPNPACSNKHKWCKVYLGK

SEQ ID NO: 2637 - protein, 36 aa, Artificial Sequence
  Synthetic
RGCKGFGDSCTPGKNECCPNHACSNKHKWCKAYLGK

SEQ ID NO: 2638 - protein, 25 aa, Artificial Sequence
  Synthetic
KLKNFAKGVAQSLLNKASCKLSGQC

SEQ ID NO: 2639 - protein, 19 aa, Artificial Sequence
  Synthetic
DKCIETLETIVKYLVQFTT

SEQ ID NO: 2640 - protein, 36 aa, Artificial Sequence
  Synthetic
RGCKGFGDSCTPGKNECCPNYACSSKHKWCKVYLGK

SEQ ID NO: 2641 - protein, 36 aa, Artificial Sequence; identical to SEQ ID NO: 2640
  Synthetic

SEQ ID NO: 2642 - protein, 36 aa, Artificial Sequence; identical to SEQ ID NO: 2640
  Synthetic

SEQ ID NO: 2643 - protein, 36 aa, Artificial Sequence; identical to SEQ ID NO: 2640
  Synthetic

SEQ ID NO: 2644 - protein, 36 aa, Artificial Sequence; identical to SEQ ID NO: 2640
  Synthetic

SEQ ID NO: 2645 - protein, 36 aa, Artificial Sequence; identical to SEQ ID NO: 2640
  Synthetic

SEQ ID NO: 2646 - protein, 36 aa, Artificial Sequence; identical to SEQ ID NO: 2640
  Synthetic

SEQ ID NO: 2647 - protein, 36 aa, Artificial Sequence; identical to SEQ ID NO: 2640
  Synthetic

SEQ ID NO: 2648 - protein, 36 aa, Artificial Sequence; identical to SEQ ID NO: 2640
  Synthetic

SEQ ID NO: 2649 - protein, 36 aa, Artificial Sequence; identical to SEQ ID NO: 2640
  Synthetic

SEQ ID NO: 2650 - protein, 36 aa, Artificial Sequence; identical to SEQ ID NO: 2640
  Synthetic

SEQ ID NO: 2651 - protein, 36 aa, Artificial Sequence; identical to SEQ ID NO: 2640
  Synthetic

SEQ ID NO: 2652 - protein, 36 aa, Artificial Sequence
  Synthetic
RGCKGFGDSCTPGKNECCPNYACSGKHKWCKVYLGK

SEQ ID NO: 2653 - protein, 36 aa, Artificial Sequence
  Synthetic
RGCKGFGDSCTPGKNECCPNYACSSKHKWCKVYSGK

SEQ ID NO: 2654 - protein, 31 aa, Artificial Sequence
  Synthetic
GGIRAAHAILGGLHLTLDWAVRGLLLLKTRL

SEQ ID NO: 2655 - protein, 36 aa, Artificial Sequence
  Synthetic
RGCKGFGDSCAPGKNECCPNHACSNKHKWCKVYLGK

SEQ ID NO: 2656 - protein, 18 aa, Artificial Sequence
  Synthetic
IKKAGTELVNFLNYFLEL

SEQ ID NO: 2657 - protein, 27 aa, Artificial Sequence
  Synthetic
LLDVVKGAAKNLLASALDKLKCKVTGC

SEQ ID NO: 2658 - protein, 42 aa, Artificial Sequence
  Synthetic
KAVEQVKNAFNKLQEKGIYKAMSEFDIFINYIEAYMTMKIRN

SEQ ID NO: 2659 - protein, 42 aa, Artificial Sequence; identical to SEQ ID NO: 2658
  Synthetic

SEQ ID NO: 2660 - protein, 33 aa, Artificial Sequence
  Synthetic
KTIQSWLNKFLSCLHIGKLSLSFLLLAIFSIVF

SEQ ID NO: 2661 - protein, 14 aa, Artificial Sequence
  Synthetic
FTKIKDALKKISQH

SEQ ID NO: 2662 - protein, 29 aa, Artificial Sequence
  Synthetic
KVLSEAVEQCTKACSSVCTGGSTAAVKSA

SEQ ID NO: 2663 - protein, 26 aa, Artificial Sequence
  Synthetic
DDAVDRCGEACYRFCTKHVDAATNVS

SEQ ID NO: 2664 - protein, 23 aa, Artificial Sequence
  Synthetic
MGLCSNACARFCNDGDVIQSVEA

SEQ ID NO: 2665 - protein, 24 aa, Artificial Sequence
  Synthetic
KVAKTVAKQAAKQGAKYIANKQME

SEQ ID NO: 2666 - protein, 24 aa, Artificial Sequence
  Synthetic
KVAKTVAKQAAKQGAKYIANKQTE

SEQ ID NO: 2667 - protein, 14 aa, Artificial Sequence
  Synthetic
DLLKDVIEGVEKLL

SEQ ID NO: 2668 - protein, 15 aa, Artificial Sequence
  Synthetic
DFLHGLTNFVRYLQK

SEQ ID NO: 2669 - protein, 12 aa, Artificial Sequence
  Synthetic
GAQSGMGCGRRF

SEQ ID NO: 2670 - protein, 42 aa, Artificial Sequence
  Synthetic
ITEAVACAKRVVRDPQGIRAWVAWKAHCQNRDVSQYVQGCGV

SEQ ID NO: 2671 - protein, 42 aa, Artificial Sequence
  Synthetic
ITEAVACAKRVVRDPQGIRAWVAWKAHCQNRDVSQYIQGCGV

SEQ ID NO: 2672 - protein, 23 aa, Artificial Sequence
  Synthetic
FESCMKKCSKICNKKKESDDIYV

SEQ ID NO: 2673 - protein, 41 aa, Artificial Sequence
  Synthetic
GMIEACIGNGGRCNENVGPPYCCSGFCLRQPNQGYGVCRNR

SEQ ID NO: 2674 - protein, 42 aa, Artificial Sequence
  Synthetic
CLKTLAGSVKGINYGAASALPGKCGIRIPYPISPSTDCSRVN

SEQ ID NO: 2675 - protein, 38 aa, Artificial Sequence
  Synthetic
KIVDHCPSGCASTLDLSREAFAQIANPVAGIINIDYFP

SEQ ID NO: 2676 - protein, 37 aa, Artificial Sequence
  Synthetic
NCAKKIVSDVHGMNAWVAWRNRCKGTDVNAWIRGCRL

SEQ ID NO: 2677 - protein, 40 aa, Artificial Sequence
  Synthetic
DFARSVVRKFIDLNQHSFGLVRERDAEQSRFRAICGPQVH

SEQ ID NO: 2678 - protein, 26 aa, Artificial Sequence
  Synthetic
IYEMLKDIFHVFERGYTSPGWNETIV

SEQ ID NO: 2679 - protein, 20 aa, Artificial Sequence
  Synthetic
RTLQKLWNHARDWCDPCPWG

SEQ ID NO: 2680 - protein, 14 aa, Artificial Sequence
  Synthetic
EAVKKLLEALSHLV

SEQ ID NO: 2681 - protein, 14 aa, Artificial Sequence
  Synthetic
EAVKKLLEALSHLV

SEQ ID NO: 2682 - protein, 42 aa, Artificial Sequence
  Synthetic
ITQAVACAKRVVRDPQGIRAWVAWKAHCQNRDVSQYVQGCGV

SEQ ID NO: 2683 - protein, 30 aa, Artificial Sequence
  Synthetic
GQCTDCCKKAGHTGGTCIYFKCKCGAESGR

SEQ ID NO: 2684 - protein, 36 aa, Artificial Sequence
  Synthetic
RGCKGFGDSCTPGKNECCPNYACSCKHKWCKVYLGK

SEQ ID NO: 2685 - protein, 14 aa, Artificial Sequence
  Synthetic
EAVKKLLEALSHLV

SEQ ID NO: 2686 - protein, 16 aa, Artificial Sequence
  Synthetic
LPSLVSGAVSLVKILG

SEQ ID NO: 2687 - protein, 40 aa, Artificial Sequence
  Synthetic
KWVKTAIKTVDGRASASKSKAETIPTQAQRSASTAVTLTG

SEQ ID NO: 2688 - protein, 38 aa, Artificial Sequence
  Synthetic
SRIAGGVERMQRGCSLTCPDIKYNGKYIYCCTRDNCNA

SEQ ID NO: 2689 - protein, 28 aa, Artificial Sequence
  Synthetic
GDSCSRWYNHCCSKLCTSRNSGPTCSRP

SEQ ID NO: 2690 - protein, 36 aa, Artificial Sequence; identical to SEQ ID NO: 2618
  Synthetic

SEQ ID NO: 2691 - protein, 22 aa, Artificial Sequence
  Synthetic
DNVASAWNQAFDNIFQTVFSHL

SEQ ID NO: 2692 - protein, 14 aa, Artificial Sequence
  Synthetic
LSDVLDRWLDGCDL

SEQ ID NO: 2693 - protein, 24 aa, Artificial Sequence
  Synthetic
KVAKTVAKQAAKQGAKYIANKQTE

SEQ ID NO: 2694 - protein, 33 aa, Artificial Sequence
  Synthetic
CFDCARACMRRGKYIRTCSFERKLCRYSISDIK

SEQ ID NO: 2695 - protein, 16 aa, Artificial Sequence
  Synthetic
LFDLLKTIIEGVEKLL

SEQ ID NO: 2696 - protein, 16 aa, Artificial Sequence
  Synthetic
LFDLLKTIIEGVEKLL

SEQ ID NO: 2697 - protein, 19 aa, Artificial Sequence
  Synthetic
IEQLMEKIANLWYTRVLGY

SEQ ID NO: 2698 - protein, 25 aa, Artificial Sequence
  Synthetic
VKKAGTDLLNFLSNFMDLKTQPATQ

SEQ ID NO: 2699 - protein, 25 aa, Artificial Sequence
  Synthetic
VKKAGTDLINFLSNFMDLRTQPATQ

SEQ ID NO: 2700 - protein, 25 aa, Artificial Sequence
  Synthetic
VKKAGTDLINFLSNFMDLRTQPATQ

SEQ ID NO: 2701 - protein, 38 aa, Artificial Sequence
  Synthetic
RKAVSELSNVLNFLSPKSNLKKRKRSQTLFRGRRASKY

SEQ ID NO: 2702 - protein, 20 aa, Artificial Sequence
  Synthetic
QAIEGALRIAKKLIGDRWGR

SEQ ID NO: 2703 - protein, 42 aa, Artificial Sequence
  Synthetic
KAVEQVKSAFSKLQEEGVYKAMSEFDIFINYIETYMTMKIKS

SEQ ID NO: 2704 - protein, 22 aa, Artificial Sequence
  Synthetic
KQFLDYLQEFLGVINTEWTIEG

SEQ ID NO: 2705 - protein, 18 aa, Artificial Sequence
  Synthetic
TIVQKFPNLLQQIVYEEC

SEQ ID NO: 2706 - protein, 13 aa, Artificial Sequence
  Synthetic
WTTFCQSIYSTLT

SEQ ID NO: 2707 - protein, 12 aa, Artificial Sequence
  Synthetic
FYGSYVGLGSSL

SEQ ID NO: 2708 - protein, 12 aa, Artificial Sequence
  Synthetic
FYGSYVGLGSSL

SEQ ID NO: 2709 - protein, 12 aa, Artificial Sequence
  Synthetic
FYGSYVGLGSSL

SEQ ID NO: 2710 - protein, 12 aa, Artificial Sequence
  Synthetic
FYGSYVGLGSSL

SEQ ID NO: 2711 - protein, 12 aa, Artificial Sequence
  Synthetic
FYGSYVGLGSSL

SEQ ID NO: 2712 - protein, 12 aa, Artificial Sequence
  Synthetic
FYGSYVGLGSSL

SEQ ID NO: 2713 - protein, 12 aa, Artificial Sequence
  Synthetic
FYGSYVGLGSSL

SEQ ID NO: 2714 - protein, 12 aa, Artificial Sequence
  Synthetic
FYGSYVGLGSSL

SEQ ID NO: 2715 - protein, 28 aa, Artificial Sequence
  Synthetic
YEIFDKVKSFFNKIMVKRRKQDDKNVLT

SEQ ID NO: 2716 - protein, 14 aa, Artificial Sequence
  Synthetic
IGHLIKTALGMLGL

SEQ ID NO: 2717 - protein, 41 aa, Artificial Sequence
  Synthetic
LKQILHSWGEECRACAEKHDYVNLIKELAPKYVETRPQTEL

SEQ ID NO: 2718 - protein, 36 aa, Artificial Sequence
  Synthetic
SKGGKCLNRCPQIVPTNVIGVCATGVPCCKSRQSTG

SEQ ID NO: 2719 - protein, 28 aa, Artificial Sequence
  Synthetic
EVMKEAVERCNNACSEVCTKGSYAVVTA

SEQ ID NO: 2720 - protein, 29 aa, Artificial Sequence
  Synthetic
GICNEGKKCCRRWWILEPYPTPVPKGKSP

SEQ ID NO: 2721 - protein, 29 aa, Artificial Sequence
  Synthetic
GICNEGKKCCRRWWILEPYPTPVPKGKSP

SEQ ID NO: 2722 - protein, 41 aa, Artificial Sequence
  Synthetic
MDNFKKYLSTAPVLLTVWLSITASGIMIINRLYPDPLIFPI

SEQ ID NO: 2723 - protein, 41 aa, Artificial Sequence; identical to SEQ ID NO: 2722
  Synthetic

SEQ ID NO: 2724 - protein, 29 aa, Artificial Sequence
  Synthetic
EEANHAVDRCNEACRRFCTKEAETVTVVS

SEQ ID NO: 2725 - protein, 29 aa, Artificial Sequence
  Synthetic
EEANHAVDRCNEACRRFCTKEAETVTVVS

SEQ ID NO: 2726 - protein, 29 aa, Artificial Sequence
  Synthetic
EEANHAVDRCNEACRRFCSKEAETVTVLS

SEQ ID NO: 2727 - protein, 15 aa, Artificial Sequence
  Synthetic
IEKLVNTALGLLSGL

SEQ ID NO: 2728 - protein, 11 aa, Artificial Sequence
  Synthetic
IEEVEDWIASY

SEQ ID NO: 2729 - protein, 34 aa, Artificial Sequence
  Synthetic
RVIKCIDHICQYARNLPDFASEISESTKMPCKGE

SEQ ID NO: 2730 - protein, 11 aa, Artificial Sequence
  Synthetic
INAVSALVHHF

SEQ ID NO: 2731 - protein, 42 aa, Artificial Sequence
  Synthetic
KAVEQVKNAFSKLQEKGVYKAMSEFDIFINYIEAYMTMKIRN

SEQ ID NO: 2732 - protein, 33 aa, Artificial Sequence
  Synthetic
CFDCARACMRRGKYIRTCSFERKLCRCSISGIK

SEQ ID NO: 2733 - protein, 25 aa, Artificial Sequence
  Synthetic
AIEKCISACSTLCTKGFVKPATETA

SEQ ID NO: 2734 - protein, 20 aa, Artificial Sequence
  Synthetic
VPKALYSAASCARSICDDNP

SEQ ID NO: 2735 - protein, 40 aa, Artificial Sequence
  Synthetic
LGRVGTRYISSLFNKKREEGQSNHANSPTTLPSRIQKMTK

SEQ ID NO: 2736 - protein, 40 aa, Artificial Sequence
  Synthetic
LGRVGTRYISSLFNKKREEGQSNHANSPTTSPSRIQKMTK

SEQ ID NO: 2737 - protein, 40 aa, Artificial Sequence
  Synthetic
ILRKARNLLNHGILLSSNNRSFCFIIQISKINPFERFLEM

SEQ ID NO: 2738 - protein, 21 aa, Artificial Sequence
  Synthetic
KAFSLAQSIFTGNSKSFFCNK

SEQ ID NO: 2739 - protein, 27 aa, Artificial Sequence
  Synthetic
GSCASVCRRVIGVAAGKCINGRCVCYP

SEQ ID NO: 2740 - protein, 27 aa, Artificial Sequence
  Synthetic
GSCASVCRRVIGVAAGKCINGRCVCYP

SEQ ID NO: 2741 - protein, 27 aa, Artificial Sequence
  Synthetic
GSCASVCRRVIGVAAGKCINGRCVCYP

SEQ ID NO: 2742 - protein, 12 aa, Artificial Sequence
  Synthetic
AFLNGLTDYLQN

SEQ ID NO: 2743 - protein, 27 aa, Artificial Sequence
  Synthetic
KECWSVCKDLFGVDRGKCMGKKCRCYQ

SEQ ID NO: 2744 - protein, 34 aa, Artificial Sequence
  Synthetic
IRKFLETIDDMLDDLARIVSDVGQNAAQRWVVYC

SEQ ID NO: 2745 - protein, 24 aa, Artificial Sequence
  Synthetic
KVAKTVAKQAAKQGAKYVVNKQME

SEQ ID NO: 2746 - protein, 24 aa, Artificial Sequence
  Synthetic
KVAKTVAKQAAKQGAKYVANKHME

SEQ ID NO: 2747 - protein, 29 aa, Artificial Sequence
  Synthetic
GYYGQCDECCKKAGDRAGICEYYKCKCNP

SEQ ID NO: 2748 - protein, 32 aa, Artificial Sequence
  Synthetic
VLYQVLSLFKRFLEQQHLQLKNESYEQPTHTE

SEQ ID NO: 2749 - protein, 27 aa, Artificial Sequence
  Synthetic
SFYSSMGDLCNNTKSVCCMVPVRMDNI

SEQ ID NO: 2750 - protein, 24 aa, Artificial Sequence
  Synthetic
RGCRRCCSYAGEAVEAETKAKPQN

SEQ ID NO: 2751 - protein, 17 aa, Artificial Sequence
  Synthetic
FLNTWITFCQSIISKLT

SEQ ID NO: 2752 - protein, 27 aa, Artificial Sequence
  Synthetic
NFVHTFIDGVDNVVCKTKDVIFTNISQ

SEQ ID NO: 2753 - protein, 25 aa, Artificial Sequence
  Synthetic
GLFSVLGSVAKHLLPHVAPIIAEKL

SEQ ID NO: 2754 - protein, 37 aa, Artificial Sequence
  Synthetic
VRECKGFGKSCVPGKNECCSGYACNSRDKWCKVLLGK

SEQ ID NO: 2755 - protein, 28 aa, Artificial Sequence
  Synthetic
AQLRELAEKMTDKDPKRLSPSGPDPHHH

SEQ ID NO: 2756 - protein, 33 aa, Artificial Sequence
  Synthetic
ARKMVTRALRALQNPSSSPLLSSPQSFSSLTLA

SEQ ID NO: 2757 - protein, 22 aa, Artificial Sequence
  Synthetic
NGFLNIIGQAANAVQNAASLCV

SEQ ID NO: 2758 - protein, 22 aa, Artificial Sequence
  Synthetic
NGFLNIIGQAANAVQNAASLCV

SEQ ID NO: 2759 - protein, 35 aa, Artificial Sequence
  Synthetic
INQMERCASHMTDLVDSVHFPLTDEHKTEAGQQEQ

SEQ ID NO: 2760 - protein, 25 aa, Artificial Sequence
  Synthetic
NVLTFLKSLLEVFQKEKMRGMGGKI

SEQ ID NO: 2761 - protein, 27 aa, Artificial Sequence
  Synthetic
GSCASVCRKVIGVAAGKCINGRCVCYP

SEQ ID NO: 2762 - protein, 16 aa, Artificial Sequence
  Synthetic
DKLASDLTKLLQHLPD

SEQ ID NO: 2763 - protein, 24 aa, Artificial Sequence
  Synthetic
NVADSLAKSALNVLRFSVFVTATE

SEQ ID NO: 2764 - protein, 18 aa, Artificial Sequence
  Synthetic
VWDMFYELFEGIRKLIFK

SEQ ID NO: 2765 - protein, 42 aa, Artificial Sequence
  Synthetic
FGRAGAKFIRFGRSRNTWEDGYASPSVNELYVKRGAKFIRFG

SEQ ID NO: 2766 - protein, 17 aa, Artificial Sequence
  Synthetic
FLNKWITFCQSIYSTMT

SEQ ID NO: 2767 - protein, 30 aa, Artificial Sequence
  Synthetic
GLAGAISSALDKLKQSQLIKNYAKKLGYPR

SEQ ID NO: 2768 - protein, 22 aa, Artificial Sequence
  Synthetic
IVHSWYYFLYSFLRLYNLYVLY

SEQ ID NO: 2769 - protein, 11 aa, Artificial Sequence
  Synthetic
ISAISAIANHL

SEQ ID NO: 2770 - protein, 29 aa, Artificial Sequence
  Synthetic
EEANDAVDRCNEACRRFCTKEAETVTVVS

SEQ ID NO: 2771 - protein, 14 aa, Artificial Sequence
  Synthetic
KWVQKYISDLKLNA

SEQ ID NO: 2772 - protein, 21 aa, Artificial Sequence
  Synthetic
GLLGSIFGAGKKIACALSGLC

SEQ ID NO: 2773 - protein, 22 aa, Artificial Sequence
  Synthetic
DNVASAWNQALDNVYATIFSKL

SEQ ID NO: 2774 - protein, 16 aa, Artificial Sequence
  Synthetic
KVAKKLISHVAKKQLQ

SEQ ID NO: 2775 - protein, 40 aa, Artificial Sequence
  Synthetic
RKLYTIMNSFCRRDLVFLLDDCNALEYPIPVTTVLPDRQR

SEQ ID NO: 2776 - protein, 24 aa, Artificial Sequence
  Synthetic
VKRVPTIAATLVFFFSNSFLPASR

SEQ ID NO: 2777 - protein, 11 aa, Artificial Sequence
  Synthetic
LRKMGGDLNSL

SEQ ID NO: 2778 - protein, 24 aa, Artificial Sequence
  Synthetic
KVAKTVAKQAAKQGAKYVVNKQME

SEQ ID NO: 2779 - protein, 24 aa, Artificial Sequence
  Synthetic
KVAKTVAKQAAKQGAKYVANKHME

SEQ ID NO: 2780 - protein, 20 aa, Artificial Sequence
  Synthetic
ITEFLNKWITFCQSIISTLT

SEQ ID NO: 2781 - protein, 12 aa, Artificial Sequence
  Synthetic
FDAFFGAVFAKM

SEQ ID NO: 2782 - protein, 11 aa, Artificial Sequence
  Synthetic
INAISAIAHHL

SEQ ID NO: 2783 - protein, 20 aa, Artificial Sequence
  Synthetic
ITEFLNKWITFCQSIFSTLT

SEQ ID NO: 2784 - protein, 20 aa, Artificial Sequence
  Synthetic
ITEFLNKWITFCQSIFSTLT

SEQ ID NO: 2785 - protein, 20 aa, Artificial Sequence
  Synthetic
ITEFLNKWITFCQSIFSTLT

SEQ ID NO: 2786 - protein, 20 aa, Artificial Sequence
  Synthetic
ITEFLNKWITFCQSIFSTLT

SEQ ID NO: 2787 - protein, 20 aa, Artificial Sequence
  Synthetic
ITEFLNKWITFCQSIFSTLT

SEQ ID NO: 2788 - protein, 30 aa, Artificial Sequence
  Synthetic
CSRAGENCYKSGRCCDGLYCKAYVVTCYKP

SEQ ID NO: 2789 - protein, 17 aa, Artificial Sequence
  Synthetic
KIFDALDKCLQDAAKVA

SEQ ID NO: 2790 - protein, 25 aa, Artificial Sequence
  Synthetic
QECQDCCKKAGHSGGTCMFFKCKCA

SEQ ID NO: 2791 - protein, 18 aa, Artificial Sequence
  Synthetic
AKKAVGKCDDFKCKCIKL

SEQ ID NO: 2792 - protein, 20 aa, Artificial Sequence
  Synthetic
ITEFLNKWITFCQSIFSTLT

SEQ ID NO: 2793 - protein, 20 aa, Artificial Sequence
  Synthetic
ITEFLNKWITFCQSIFSTLT

SEQ ID NO: 2794 - protein, 12 aa, Artificial Sequence
  Synthetic
NWCDHLCSCCGS

SEQ ID NO: 2795 - protein, 15 aa, Artificial Sequence
  Synthetic
RFLGGILNTITGLLG

SEQ ID NO: 2796 - protein, 28 aa, Artificial Sequence
  Synthetic
KHAHSMITSMLSFVNSVVNFGRSFVRNE

SEQ ID NO: 2797 - protein, 20 aa, Artificial Sequence
  Synthetic
DIMYQAERALEKLASSFRCE

SEQ ID NO: 2798 - protein, 35 aa, Artificial Sequence
  Synthetic
NVAAKAFHRIGRTIRDECCSNPACRVNNPHVCRRR

SEQ ID NO: 2799 - protein, 14 aa, Artificial Sequence
  Synthetic
WGECYERIASGISG

SEQ ID NO: 2800 - protein, 17 aa, Artificial Sequence
  Synthetic
FTEFIQSFEKVIQKECK

SEQ ID NO: 2801 - protein, 39 aa, Artificial Sequence
  Synthetic
IAEAWKGAKECNAKCAALGTTRGGVCQKFLGDLYCCCWD

SEQ ID NO: 2802 - protein, 33 aa, Artificial Sequence
  Synthetic
DEIMQGFIRAFRPLPRHLWYLLDLKQMEEPCRF

SEQ ID NO: 2803 - protein, 21 aa, Artificial Sequence
  Synthetic
FRSAEDCMRTCGGAIGPRENL

SEQ ID NO: 2804 - protein, 30 aa, Artificial Sequence
  Synthetic
VLDNVETALHNAAKAGFKLIKPIEKLIMPK

SEQ ID NO: 2805 - protein, 36 aa, Artificial Sequence
  Synthetic
RGCKGFGDSCTPGKNECCPDHACSNKHKWCKVYLGK

SEQ ID NO: 2806 - protein, 22 aa, Artificial Sequence
  Synthetic
TQARSCCTRLGRCCHVAKGYSG

SEQ ID NO: 2807 - protein, 22 aa, Artificial Sequence
  Synthetic
TQARSCCTRLGRCCHVAKGYSG

SEQ ID NO: 2808 - protein, 22 aa, Artificial Sequence
  Synthetic
TQARSCCTRLGRCCHVAKGYSG

SEQ ID NO: 2809 - protein, 22 aa, Artificial Sequence
  Synthetic
TQARSCCTRLGRCCHVAKGYSG

SEQ ID NO: 2810 - protein, 42 aa, Artificial Sequence
  Synthetic
IFKHGRHAAKHIGHAAVNHYLGEQQDLDKRAVDEDPNVIVFE

SEQ ID NO: 2811 - protein, 42 aa, Artificial Sequence
  Synthetic
TEMCRAMDGYLRCSHPIILAKCGSDAWTLVSTVCLSRAKLFF

SEQ ID NO: 2812 - protein, 20 aa, Artificial Sequence
  Synthetic
DCCSNVCSTMSYVCQENWSG

SEQ ID NO: 2813 - protein, 19 aa, Artificial Sequence
  Synthetic
QEMGQVADYVLEQAKAGWK

SEQ ID NO: 2814 - protein, 19 aa, Artificial Sequence
  Synthetic
QEMGQVADYVLEQAKAGWK

SEQ ID NO: 2815 - protein, 17 aa, Artificial Sequence
  Synthetic
VGKAAGKCMNGKCKCYP

SEQ ID NO: 2816 - protein, 20 aa, Artificial Sequence
  Synthetic
LAKYYSALRHYINLITRQRY

SEQ ID NO: 2817 - protein, 20 aa, Artificial Sequence
  Synthetic
LAKYYSALRHYINLITRQRY

SEQ ID NO: 2818 - protein, 20 aa, Artificial Sequence
  Synthetic
LAKYYSALRHYINLITRQRY

SEQ ID NO: 2819 - protein, 20 aa, Artificial Sequence
  Synthetic
LAKYYSALRHYINLITRQRY

SEQ ID NO: 2820 - protein, 20 aa, Artificial Sequence
  Synthetic
LAKYYSALRHYINLITRQRY

SEQ ID NO: 2821 - protein, 26 aa, Artificial Sequence
  Synthetic
KYANSCCQNIEDCLYLNVWIPAPKPK

SEQ ID NO: 2822 - protein, 25 aa, Artificial Sequence
  Synthetic
QECQDCCKKAGHNGGTCMFFKCKCA

SEQ ID NO: 2823 - protein, 25 aa, Artificial Sequence
  Synthetic
QECQDCCKKAGHNGGTCMFFKCKCA

SEQ ID NO: 2824 - protein, 25 aa, Artificial Sequence
  Synthetic
QECQDCCKKAGHNGGTCMFFKCKCA

SEQ ID NO: 2825 - protein, 25 aa, Artificial Sequence
  Synthetic
QECQDCCKKAGHNGGTCMFFKCKCA

SEQ ID NO: 2826 - protein, 35 aa, Artificial Sequence
  Synthetic
GLFRFARGYVQASTHEFNLKTGNAIVEYNCYLLHY

SEQ ID NO: 2827 - protein, 31 aa, Artificial Sequence; identical to SEQ ID NO: 2654
  Synthetic

SEQ ID NO: 2828 - protein, 12 aa, Artificial Sequence
  Synthetic
CKWVEKAWKGLL

SEQ ID NO: 2829 - protein, 21 aa, Artificial Sequence
  Synthetic
TIVEFLNRWITFCQSIISTMT

SEQ ID NO: 2830 - protein, 28 aa, Artificial Sequence
  Synthetic
DCYRRFEKGVEKGQICWCIETGVTFSKE

SEQ ID NO: 2831 - protein, 33 aa, Artificial Sequence; identical to SEQ ID NO: 2732
  Synthetic

SEQ ID NO: 2832 - protein, 33 aa, Artificial Sequence
  Synthetic
CFDCARACMRRGKYIRTCSFERKLCRCSISDIK

SEQ ID NO: 2833 - protein, 18 aa, Artificial Sequence
  Synthetic
NGISYIAKSAGSILNFSK

SEQ ID NO: 2834 - protein, 17 aa, Artificial Sequence
  Synthetic
LKKCCEGFCGKACMDPK

SEQ ID NO: 2835 - protein, 20 aa, Artificial Sequence
  Synthetic
MKKIVEHMAERVEDMKIRKK

SEQ ID NO: 2836 - protein, 33 aa, Artificial Sequence; identical to SEQ ID NO: 2832
  Synthetic

SEQ ID NO: 2837 - protein, 15 aa, Artificial Sequence
  Synthetic
DFLHELTNFVRYLQK

SEQ ID NO: 2838 - protein, 15 aa, Artificial Sequence
  Synthetic
DFLHELTNFVRYLQK

SEQ ID NO: 2839 - protein, 42 aa, Artificial Sequence
  Synthetic
FFKKAAHVGKHVGKAALTHYLGDKQELNKRAVDEDPNVIVFE

SEQ ID NO: 2840 - protein, 42 aa, Artificial Sequence; identical to SEQ ID NO: 2839
  Synthetic

SEQ ID NO: 2841 - protein, 19 aa, Artificial Sequence
  Synthetic
RACQQFLKQCQLRSFALPL

SEQ ID NO: 2842 - protein, 13 aa, Artificial Sequence
  Synthetic
GPGLVGGILGGIL

SEQ ID NO: 2843 - protein, 23 aa, Artificial Sequence
  Synthetic
AYDDFVKQAQEVQKKLHEAASKQ

SEQ ID NO: 2844 - protein, 30 aa, Artificial Sequence
  Synthetic
GAIKDALKGAAKTVAVELLKKAQCKLEKTC

SEQ ID NO: 2845 - protein, 22 aa, Artificial Sequence
  Synthetic
NNLKEMLDYLYQMMNMKENTSS

SEQ ID NO: 2846 - protein, 17 aa, Artificial Sequence
  Synthetic
GGNCDGIMRQCKCIRQC

SEQ ID NO: 2847 - protein, 11 aa, Artificial Sequence
  Synthetic
INAISAIADHF

SEQ ID NO: 2848 - protein, 22 aa, Artificial Sequence
  Synthetic
TQARSCCTRLGRCCHVAKGYSG

SEQ ID NO: 2849 - protein, 17 aa, Artificial Sequence
  Synthetic
FLNGWITFCQSIISTLT

SEQ ID NO: 2850 - protein, 17 aa, Artificial Sequence
  Synthetic
FLNGWITFCQSIISTLT

SEQ ID NO: 2851 - protein, 17 aa, Artificial Sequence
  Synthetic
FLNGWITFCQSIISTLT

SEQ ID NO: 2852 - protein, 17 aa, Artificial Sequence
  Synthetic
FLNGWITFCQSIISTLT

SEQ ID NO: 2853 - protein, 17 aa, Artificial Sequence
  Synthetic
FLNGWITFCQSIISTLT

SEQ ID NO: 2854 - protein, 17 aa, Artificial Sequence
  Synthetic
FLNGWITFCQSIISTLT

SEQ ID NO: 2855 - protein, 26 aa, Artificial Sequence
  Synthetic
SNFKDLVDSLLQVLNVKERTPQLNQQ

SEQ ID NO: 2856 - protein, 29 aa, Artificial Sequence
  Synthetic
EIVNEAVDKCAKACSTVCTKSSMNAVETA

SEQ ID NO: 2857 - protein, 21 aa, Artificial Sequence
  Synthetic
SMVSLLKRLLTVTRWKLQITG

SEQ ID NO: 2858 - protein, 16 aa, Artificial Sequence
  Synthetic
NVWNCIGGGCSKTCGY

SEQ ID NO: 2859 - protein, 17 aa, Artificial Sequence
  Synthetic
NLFASALDTLKCKITGC

SEQ ID NO: 2860 - protein, 25 aa, Artificial Sequence
  Synthetic
WLAGCPSGWHNCKKHGPTIGWCCKQ

SEQ ID NO: 2861 - protein, 25 aa, Artificial Sequence
  Synthetic
WLAGCPSGWHNCKKHGPTIGWCCKQ

SEQ ID NO: 2862 - protein, 25 aa, Artificial Sequence
  Synthetic
WLAGCPSGWHNCKKHGPTIGWCCKQ

SEQ ID NO: 2863 - protein, 25 aa, Artificial Sequence
  Synthetic
WLAGCPSGWHNCKKHGPTIGWCCKQ

SEQ ID NO: 2864 - protein, 25 aa, Artificial Sequence
  Synthetic
WLAGCPSGWHNCKKHGPTIGWCCKQ

SEQ ID NO: 2865 - protein, 25 aa, Artificial Sequence
  Synthetic
WLAGCPSGWHNCKKHGPTIGWCCKQ

SEQ ID NO: 2866 - protein, 25 aa, Artificial Sequence
  Synthetic
WLAGCPSGWHNCKKHGPTIGWCCKQ

SEQ ID NO: 2867 - protein, 25 aa, Artificial Sequence
  Synthetic
WLAGCPSGWHNCKKHGPTIGWCCKQ

SEQ ID NO: 2868 - protein, 13 aa, Artificial Sequence
  Synthetic
KRLRKMGGDLNSP

SEQ ID NO: 2869 - protein, 28 aa, Artificial Sequence
  Synthetic
DCYRRFEQGVAKGIQCWCIEEDVTYKGV

SEQ ID NO: 2870 - protein, 18 aa, Artificial Sequence
  Synthetic
GLVSECCGTCNVLRNRCV

SEQ ID NO: 2871 - protein, 20 aa, Artificial Sequence
  Synthetic
FLQQAYEAFESLANFVSQDD

SEQ ID NO: 2872 - protein, 29 aa, Artificial Sequence
  Synthetic
KGATKWDSAVESSWAPVLDFVFSTLKNEL

SEQ ID NO: 2873 - protein, 21 aa, Artificial Sequence
  Synthetic
KQAKAIIKKVQRKNSEKYKNI

SEQ ID NO: 2874 - protein, 36 aa, Artificial Sequence
  Synthetic
ECDRVAANCFHQNKNTYNKNYRFLSSSRCRQTSEQC

SEQ ID NO: 2875 - protein, 36 aa, Artificial Sequence; identical to SEQ ID NO: 2874
  Synthetic

SEQ ID NO: 2876 - protein, 15 aa, Artificial Sequence
  Synthetic
ELLRRCLDNCEKEHD

SEQ ID NO: 2877 - protein, 18 aa, Artificial Sequence
  Synthetic
GALQNLLKVASCKLDKTC

SEQ ID NO: 2878 - protein, 34 aa, Artificial Sequence
  Synthetic
KGKQMLKEYANKVLSPEEEAPAAVPAGAPERRRR

SEQ ID NO: 2879 - protein, 23 aa, Artificial Sequence
  Synthetic
GRALGKFLQDILWEEVKEAPADK

SEQ ID NO: 2880 - protein, 23 aa, Artificial Sequence
  Synthetic
GRALGKFLQDILWEEVKEAPANK

SEQ ID NO: 2881 - protein, 26 aa, Artificial Sequence
  Synthetic
IKEAFEDFVKQAEAVQKKVHDAATKQ

SEQ ID NO: 2882 - protein, 19 aa, Artificial Sequence
  Synthetic
IIKAAQEAWKIIQQIPRPP

SEQ ID NO: 2883 - protein, 21 aa, Artificial Sequence
  Synthetic
TSLKDFLESLKSIMQMDYSQY

SEQ ID NO: 2884 - protein, 23 aa, Artificial Sequence
  Synthetic
HAFEFMQRALQDLRKTAYSLDSR

SEQ ID NO: 2885 - protein, 37 aa, Artificial Sequence
  Synthetic
NCAKKIVSDGNGMNAWVAWRNRCKGTDVQAWIRGCRL

SEQ ID NO: 2886 - protein, 42 aa, Artificial Sequence
  Synthetic
CRKLFGGCVGDGDCCLHLGCKTRKLPPFADPYCAWDWTFGRK

SEQ ID NO: 2887 - protein, 25 aa, Artificial Sequence
  Synthetic
IKKAGTELVNFLSYFVELGTQPATQ

SEQ ID NO: 2888 - protein, 25 aa, Artificial Sequence
  Synthetic
IKKAGTELVNFLSYFVELGTQPATQ

SEQ ID NO: 2889 - protein, 20 aa, Artificial Sequence
  Synthetic
FYDPAKRCCRTCFGCTPCCG

SEQ ID NO: 2890 - protein, 18 aa, Artificial Sequence
  Synthetic
LQSFLELAYRVLRYLAEP

SEQ ID NO: 2891 - protein, 25 aa, Artificial Sequence
  Synthetic
IKKAGTELVNFLSYFMELGTQPATQ

SEQ ID NO: 2892 - protein, 25 aa, Artificial Sequence
  Synthetic
IKKAGTELVNFLSYFMELGTQPATQ

SEQ ID NO: 2893 - protein, 21 aa, Artificial Sequence
  Synthetic
LAAFFGLATGLFLGLKAIKLI

SEQ ID NO: 2894 - protein, 25 aa, Artificial Sequence
  Synthetic
NMLTFLKSLLEVFQKENVRKMRDRV

SEQ ID NO: 2895 - protein, 40 aa, Artificial Sequence
  Synthetic
VGNFVHGFSHVFGDDQQDNGKFYGHYAEDNGKHWYDTGDQ

SEQ ID NO: 2896 - protein, 28 aa, Artificial Sequence
  Synthetic
KGGCNRGEQVYGTCSGRLLFCCRRRHRH

SEQ ID NO: 2897 - protein, 20 aa, Artificial Sequence
  Synthetic
TAFRQIGNCGHFKVRCCKIR

SEQ ID NO: 2898 - protein, 38 aa, Artificial Sequence
  Synthetic
RACRELLGGCSKDSDCCAHLECRKKWPYHCVWDWTIGK

SEQ ID NO: 2899 - protein, 41 aa, Artificial Sequence
  Synthetic
RACRELLGGCSKDSDCCAHLECRKKWPYHCVWDWTFGNEKS

SEQ ID NO: 2900 - protein, 28 aa, Artificial Sequence
  Synthetic
EAMKEAVERCNNACSEVCTKGSYAVVTA

SEQ ID NO: 2901 - protein, 31 aa, Artificial Sequence
  Synthetic
GNKFFRGCAAACPKAEHNEVVRCCARDKCNL

SEQ ID NO: 2902 - protein, 34 aa, Artificial Sequence
  Synthetic
LMTSLLEKLQEAVSDGRYVLRIKGIIKNKIKTLK

SEQ ID NO: 2903 - protein, 29 aa, Artificial Sequence
  Synthetic
RRVEQFLDYLEEFLRTINIEWNTEWTVES

SEQ ID NO: 2904 - protein, 24 aa, Artificial Sequence
  Synthetic
DFITLIYYVVEDVNSLMRGTHGFH

SEQ ID NO: 2905 - protein, 42 aa, Artificial Sequence
  Synthetic
CLKNAARGIKGLNAGNAASIPSKCGVSVPYTISASIDCSRVS

SEQ ID NO: 2906 - protein, 42 aa, Artificial Sequence; identical to SEQ ID NO: 2905
  Synthetic

SEQ ID NO: 2907 - protein, 21 aa, Artificial Sequence
  Synthetic
KAVEFLNKWITFCQSIYSTMT

SEQ ID NO: 2908 - protein, 21 aa, Artificial Sequence
  Synthetic
KAVEFLNKWITFCQSIYSTMT

SEQ ID NO: 2909 - protein, 21 aa, Artificial Sequence
  Synthetic
KAVEFLNKWITFCQSIYSTMT

SEQ ID NO: 2910 - protein, 21 aa, Artificial Sequence
  Synthetic
KAVEFLNKWITFCQSIYSTMT

SEQ ID NO: 2911 - protein, 21 aa, Artificial Sequence
  Synthetic
KAVEFLNKWITFCQSIYSTMT

SEQ ID NO: 2912 - protein, 20 aa, Artificial Sequence
  Synthetic
NGCRRCCSYAGEAVQTQPGH

SEQ ID NO: 2913 - protein, 40 aa, Artificial Sequence
  Synthetic
MLDGLNDYCTGVTPDCPRNPNKGESDELEWSAAATGSVLM

SEQ ID NO: 2914 - protein, 36 aa, Artificial Sequence
  Synthetic
ECDRVAANCFHQNKNTYNKEYKFLSSSKCRQRSEQC

SEQ ID NO: 2915 - protein, 18 aa, Artificial Sequence
  Synthetic
SAGKTALNKIACKIDKTC

SEQ ID NO: 2916 - protein, 37 aa, Artificial Sequence
  Synthetic
NCAKKIVSDGNGMNAWVAWRKHCKGTDVNVWIRGCRL

SEQ ID NO: 2917 - protein, 20 aa, Artificial Sequence
  Synthetic
RSCRRCCSYAGEAVQTQPGN

SEQ ID NO: 2918 - protein, 20 aa, Artificial Sequence
  Synthetic
RSCRRCCSYAGEAVQTQPGN

SEQ ID NO: 2919 - protein, 21 aa, Artificial Sequence
  Synthetic
KAVEFLNKWITFCQSIYSTMT

SEQ ID NO: 2920 - protein, 21 aa, Artificial Sequence
  Synthetic
KAVEFLNKWITFCQSIYSTMT

SEQ ID NO: 2921 - protein, 21 aa, Artificial Sequence
  Synthetic
KAVEFLNKWITFCQSIYSTMT

SEQ ID NO: 2922 - protein, 21 aa, Artificial Sequence
  Synthetic
KAVEFLNKWITFCQSIYSTMT

SEQ ID NO: 2923 - protein, 21 aa, Artificial Sequence
  Synthetic
KAVEFLNKWITFCQSIYSTMT

SEQ ID NO: 2924 - protein, 11 aa, Artificial Sequence
  Synthetic
TCVASIVRQAA

SEQ ID NO: 2925 - protein, 35 aa, Artificial Sequence
  Synthetic
EEIIRLYSNGLRLQQTMSALICLLTFLLELCCWQL

SEQ ID NO: 2926 - protein, 17 aa, Artificial Sequence
  Synthetic
FLNKWITFCQSIYSTMT

SEQ ID NO: 2927 - protein, 22 aa, Artificial Sequence
  Synthetic
SNFKELVDSLLQVLNVKEGTPS

SEQ ID NO: 2928 - protein, 34 aa, Artificial Sequence
  Synthetic
LANFISSLTAGGLVVLTIAVALIVISRTDRVTRF

SEQ ID NO: 2929 - protein, 20 aa, Artificial Sequence
  Synthetic
IFKTLLSAVGSALSSSGGQE

SEQ ID NO: 2930 - protein, 34 aa, Artificial Sequence
  Synthetic
KRFGKKYPRGCAATCPEAKPHEIVECCSTDKCNK

SEQ ID NO: 2931 - protein, 34 aa, Artificial Sequence; identical to SEQ ID NO: 2930
  Synthetic

SEQ ID NO: 2932 - protein, 26 aa, Artificial Sequence
  Synthetic
RGLWSTIKNVGKEAAIAAGKAALGAL

SEQ ID NO: 2933 - protein, 29 aa, Artificial Sequence
  Synthetic
RGLWSTIKNVGKEAAIAAGKAALGALGEQ

SEQ ID NO: 2934 - protein, 29 aa, Artificial Sequence
  Synthetic
RGLWSTIKNVGKEAAIAAGKAVLGSLGEQ

SEQ ID NO: 2935 - protein, 32 aa, Artificial Sequence
  Synthetic
GKRGLSDLYDLDEMFDGEISQADIDFLKELMR

SEQ ID NO: 2936 - protein, 25 aa, Artificial Sequence
  Synthetic
WLAGCPSGWHNCKSSGPNIGWCCKK

SEQ ID NO: 2937 - protein, 25 aa, Artificial Sequence
  Synthetic
RKVEQFLDYLEDFLRTVNTEWTIES

SEQ ID NO: 2938 - protein, 19 aa, Artificial Sequence
  Synthetic
KWVQDYMNHLDQKSQAQKP

SEQ ID NO: 2939 - protein, 22 aa, Artificial Sequence
  Synthetic
AVDVLSRLVNRATSLGILQQLH

SEQ ID NO: 2940 - protein, 18 aa, Artificial Sequence
  Synthetic
AKKAVGKCDDFKCNCIKL

SEQ ID NO: 2941 - protein, 17 aa, Artificial Sequence
  Synthetic
LESILQGFPRMKLSAEA

SEQ ID NO: 2942 - protein, 26 aa, Artificial Sequence
  Synthetic
KRFLSTLLNVASKVVPTLFCKITKKC

SEQ ID NO: 2943 - protein, 15 aa, Artificial Sequence
  Synthetic
QCCANFCRKATSTCM

SEQ ID NO: 2944 - protein, 16 aa, Artificial Sequence
  Synthetic
HHITTVMEHLIKELYG

SEQ ID NO: 2945 - protein, 20 aa, Artificial Sequence
  Synthetic
LFKTLLSAVGSALSSSGGQE

SEQ ID NO: 2946 - protein, 19 aa, Artificial Sequence
  Synthetic
GREYEEYAQKVHSGLPFIE

SEQ ID NO: 2947 - protein, 19 aa, Artificial Sequence
  Synthetic
GREYEEYAQKVHSGLPFIE

SEQ ID NO: 2948 - protein, 22 aa, Artificial Sequence
  Synthetic
LLNSMRTFISDLEEWDREQYDR

SEQ ID NO: 2949 - protein, 30 aa, Artificial Sequence
  Synthetic
THLSELLEEVCKSMSDYALHLDPDTQQKKY

SEQ ID NO: 2950 - protein, 20 aa, Artificial Sequence
  Synthetic
FIGTALGIASAIPAIVKLFK

SEQ ID NO: 2951 - protein, 32 aa, Artificial Sequence
  Synthetic
EYFIKKIRRVVENVAKAVVINKAVGAVAGTIG

SEQ ID NO: 2952 - protein, 27 aa, Artificial Sequence
  Synthetic
MLDGLNDYCTGISSDCPRNRYKGKEDD

SEQ ID NO: 2953 - protein, 15 aa, Artificial Sequence
  Synthetic
LKKVKTLLNDIRRMM

SEQ ID NO: 2954 - protein, 18 aa, Artificial Sequence
  Synthetic
DKIIAVAKEMGKAGLQAA

SEQ ID NO: 2955 - protein, 20 aa, Artificial Sequence
  Synthetic
RGCSRCCSYAGEAVQTQPGH

SEQ ID NO: 2956 - protein, 21 aa, Artificial Sequence
  Synthetic
RRVQRCIERLEQNSQPRTYKQ

SEQ ID NO: 2957 - protein, 37 aa, Artificial Sequence
  Synthetic
NKAAGAINKFVADKIGVTPSQAASMTLDEIVDAMYYD

SEQ ID NO: 2958 - protein, 20 aa, Artificial Sequence
  Synthetic
LARYYTALRHYINLITRQRY

SEQ ID NO: 2959 - protein, 21 aa, Artificial Sequence
  Synthetic
RIAHECCKEGCTYDDILDYCA

SEQ ID NO: 2960 - protein, 42 aa, Artificial Sequence
  Synthetic
VWDWIKSAAKKIWSSEPVSQLKGQVLNAAKNYVAEKIGATPT

SEQ ID NO: 2961 - protein, 11 aa, Artificial Sequence
  Synthetic
ACGGKYFKCGR

SEQ ID NO: 2962 - protein, 20 aa, Artificial Sequence
  Synthetic
RGCSRCCSYAGEAVQTQPGH

SEQ ID NO: 2963 - protein, 12 aa, Artificial Sequence
  Synthetic
DNGKHWYDTGDQ

SEQ ID NO: 2964 - protein, 20 aa, Artificial Sequence
  Synthetic
LAKYYTALRHYINLITRQRY

SEQ ID NO: 2965 - protein, 20 aa, Artificial Sequence
  Synthetic
LAKYYTALRHYINLITRQRY

SEQ ID NO: 2966 - protein, 20 aa, Artificial Sequence
  Synthetic
LAKYYTALRHYINLITRQRY

SEQ ID NO: 2967 - protein, 21 aa, Artificial Sequence
  Synthetic
NAVEFLNKWITFCQSIYSTMT

SEQ ID NO: 2968 - protein, 42 aa, Artificial Sequence
  Synthetic
IQGAARALGSRLNAGRAARLPGACRVRISYPISARTNCNTVR

SEQ ID NO: 2969 - protein, 17 aa, Artificial Sequence
  Synthetic
FLNKWITFCQSIYSTLT

SEQ ID NO: 2970 - protein, 33 aa, Artificial Sequence
  Synthetic
SVNNFCQYFIYSLKQKDNFFMIIFTMLNCLIII

SEQ ID NO: 2971 - protein, 42 aa, Artificial Sequence
  Synthetic
CHRACGSCCAKCQCVPPGTSGNTASCPCYASIRTHGNKLKCP

SEQ ID NO: 2972 - protein, 39 aa, Artificial Sequence
  Synthetic
CEKGFQCCSSFCGIVCSSETFQKRNRIKHKGSEVIMPAN

SEQ ID NO: 2973 - protein, 22 aa, Artificial Sequence
  Synthetic
ARMATKLGRKVLNKRRQKGENS

SEQ ID NO: 2974 - protein, 14 aa, Artificial Sequence
  Synthetic
EAVKKLLEALSHLV

SEQ ID NO: 2975 - protein, 27 aa, Artificial Sequence
  Synthetic
ASMEKLMERGFNESMRLSPGGPDPRHH

SEQ ID NO: 2976 - protein, 23 aa, Artificial Sequence
  Synthetic
LPAIVGAAGQFLPKIFCAISKKC

SEQ ID NO: 2977 - protein, 42 aa, Artificial Sequence
  Synthetic
ITQAVACAKRVVSDPNGIRAWVAWRAHCENQDVSQYVRNCGV

SEQ ID NO: 2978 - protein, 42 aa, Artificial Sequence; identical to SEQ ID NO: 2977
  Synthetic

SEQ ID NO: 2979 - protein, 34 aa, Artificial Sequence
  Synthetic
TGVFNIIKTIGKEAGMDVIRAGIDTISCKIKGEC

SEQ ID NO: 2980 - protein, 17 aa, Artificial Sequence
  Synthetic
LFDVIKKVASVIGLASP

SEQ ID NO: 2981 - protein, 22 aa, Artificial Sequence
  Synthetic
GDDMNDYCTGITPDCPRNPYKD

SEQ ID NO: 2982 - protein, 22 aa, Artificial Sequence
  Synthetic
RGLLSGILGAGKNIVCGLSGLC

SEQ ID NO: 2983 - protein, 22 aa, Artificial Sequence
  Synthetic
RGLLSGILGAGKNIVCGLSGLC

SEQ ID NO: 2984 - protein, 20 aa, Artificial Sequence
  Synthetic
ITEFLNKWITFCQSIFSTLT

SEQ ID NO: 2985 - protein, 19 aa, Artificial Sequence
  Synthetic
RLYELLHGAGNHAAGILTL

SEQ ID NO: 2986 - protein, 18 aa, Artificial Sequence
  Synthetic
KWIQEYLEKALNKKAKKT

SEQ ID NO: 2987 - protein, 20 aa, Artificial Sequence
  Synthetic
MAHYAAELRRYINMLTRPRY

SEQ ID NO: 2988 - protein, 20 aa, Artificial Sequence
  Synthetic
NGCRRCCSYAGEAVQTQPGH

SEQ ID NO: 2989 - protein, 14 aa, Artificial Sequence
  Synthetic
EAVKKLLEALSHLV

SEQ ID NO: 2990 - protein, 29 aa, Artificial Sequence
  Synthetic
EEANHAVDRCNEACRRFCTKEAETVTAVS

SEQ ID NO: 2991 - protein, 35 aa, Artificial Sequence
  Synthetic
CDKIAANCFAANLKTYNKKLRFYNKFRCRGAAPAC

SEQ ID NO: 2992 - protein, 17 aa, Artificial Sequence
  Synthetic
LSDVIDEYVSNVQMVGK

SEQ ID NO: 2993 - protein, 17 aa, Artificial Sequence
  Synthetic
LSDVIDEYVSNVQMVGK

SEQ ID NO: 2994 - protein, 41 aa, Artificial Sequence
  Synthetic
VTKYCNQVTGALVAGLIALITYIILLLHSIYTFLNPLLEKA

SEQ ID NO: 2995 - protein, 21 aa, Artificial Sequence
  Synthetic
ACNAALAKLEKIADDINDDDD

SEQ ID NO: 2996 - protein, 20 aa, Artificial Sequence
  Synthetic
LNRYYASLRHYLNLVTRQRY

SEQ ID NO: 2997 - protein, 42 aa, Artificial Sequence
  Synthetic
YCGKGPKYCGRASTTVDHQADVAATKTAKNPTDAKLAGAGSP

SEQ ID NO: 2998 - protein, 33 aa, Artificial Sequence
  Synthetic
KNWSEFVRSMLRAMSKVAAYILQEKHNHDDDDE

SEQ ID NO: 2999 - protein, 24 aa, Artificial Sequence
  Synthetic
AVSQCTNACSNFCTKGSAKAVETA

SEQ ID NO: 3000 - protein, 22 aa, Artificial Sequence
  Synthetic
WFDPVKRCCSRYCWKCIPCCPY

SEQ ID NO: 3001 - protein, 20 aa, Artificial Sequence
  Synthetic
NGCSRCCSYAGEAVQTQPGH

SEQ ID NO: 3002 - protein, 12 aa, Artificial Sequence
  Synthetic
CGWVQDAYKGIV

SEQ ID NO: 3003 - protein, 32 aa, Artificial Sequence
  Synthetic
KKLGDSAISCGETCFKFKCYTPRCSCSYPVCK

SEQ ID NO: 3004 - protein, 17 aa, Artificial Sequence
  Synthetic
LNALLHHGLNCAKGVLA

SEQ ID NO: 3005 - protein, 19 aa, Artificial Sequence
  Synthetic
FEQLVEKIKSLWYTRVLGY

SEQ ID NO: 3006 - protein, 23 aa, Artificial Sequence
  Synthetic
KGYHGCSRCCSYAGEAVQTQSGH

SEQ ID NO: 3007 - protein, 14 aa, Artificial Sequence
  Synthetic
GMNAIENMFSFCFR

SEQ ID NO: 3008 - protein, 42 aa, Artificial Sequence
  Synthetic
ACRCLQSAAKGVNPSLASGLPGKCGVSIPYPISTSTNCATIK

SEQ ID NO: 3009 - protein, 20 aa, Artificial Sequence
  Synthetic
MARYYSALRHYINLITRQRY

SEQ ID NO: 3010 - protein, 20 aa, Artificial Sequence
  Synthetic
MARYYSALRHYINLITRQRY

SEQ ID NO: 3011 - protein, 20 aa, Artificial Sequence
  Synthetic
MARYYSALRHYINLITRQRY

SEQ ID NO: 3012 - protein, 21 aa, Artificial Sequence
  Synthetic
KNINEFLKSFIHIVQMFINPS

SEQ ID NO: 3013 - protein, 20 aa, Artificial Sequence
  Synthetic
NDMCYKLTSLLSRCYPKKSE

SEQ ID NO: 3014 - protein, 16 aa, Artificial Sequence
  Synthetic
WNRCFARIANGISAGL

SEQ ID NO: 3015 - protein, 42 aa, Artificial Sequence
  Synthetic
CYGAAGTCARIVCDCDRTAALCFGNSEYIERHKNIDTKRHCR

SEQ ID NO: 3016 - protein, 14 aa, Artificial Sequence
  Synthetic
EAVKKLLEALSHLV

SEQ ID NO: 3017 - protein, 20 aa, Artificial Sequence
  Synthetic
MAKYYSALRHYINLITRQRY

SEQ ID NO: 3018 - protein, 20 aa, Artificial Sequence
  Synthetic
MAKYYSALRHYINLITRQRY

SEQ ID NO: 3019 - protein, 18 aa, Artificial Sequence
  Synthetic
LKCCKSMCGKVCLTPVKA

SEQ ID NO: 3020 - protein, 20 aa, Artificial Sequence
  Synthetic
SLCSTLLNHCMTLLNCCAWL

SEQ ID NO: 3021 - protein, 20 aa, Artificial Sequence
  Synthetic
KAERMVRRAAKQAEEEADQR

SEQ ID NO: 3022 - protein, 36 aa, Artificial Sequence
  Synthetic
GEGLCDNLCKYEGAISGVCVSDPHRCLCRNRKPGCS

SEQ ID NO: 3023 - protein, 20 aa, Artificial Sequence
  Synthetic
MNKYLTALRHYINLVTRQRY

SEQ ID NO: 3024 - protein, 23 aa, Artificial Sequence
  Synthetic
KALSSLCEIASEACSAWFPLPDN

SEQ ID NO: 3025 - protein, 38 aa, Artificial Sequence
  Synthetic
SWIAGGVERIERGCSLTCPDIKYNGKYIYCCTRDNCNA

SEQ ID NO: 3026 - protein, 33 aa, Artificial Sequence
  Synthetic
RGCKGFGDSCTPEKNECCPNYACSSKHKWCKSI

SEQ ID NO: 3027 - protein, 40 aa, Artificial Sequence
  Synthetic
RGIRPVGRFGRRRATPRDVTGLGQLSCLPLDGRTKFSQRG

SEQ ID NO: 3028 - protein, 14 aa, Artificial Sequence
  Synthetic
EDLCQIADRMIERL

SEQ ID NO: 3029 - protein, 34 aa, Artificial Sequence
  Synthetic
TELMTYARDIFQYAGCLIDFEVINIDPSSSGNDD

SEQ ID NO: 3030 - protein, 12 aa, Artificial Sequence
  Synthetic
VGGGGGGGSRVI

SEQ ID NO: 3031 - protein, 22 aa, Artificial Sequence
  Synthetic
EAGLEALRTGIDVIGCKIKGEC

SEQ ID NO: 3032 - protein, 22 aa, Artificial Sequence
  Synthetic
EAGLEALRTGIDVIGCKIKGEC

SEQ ID NO: 3033 - protein, 36 aa, Artificial Sequence
  Synthetic
ECDRVAANCFHQNQNTYNKNYKFLSSSRCRQTSEQC

SEQ ID NO: 3034 - protein, 42 aa, Artificial Sequence
  Synthetic
KAVAQVKNAVSKLQEKGVYKAMSEFDIFIDYIEAYMTMKTQN

SEQ ID NO: 3035 - protein, 42 aa, Artificial Sequence; identical to SEQ ID NO: 2977
  Synthetic

SEQ ID NO: 3036 - protein, 25 aa, Artificial Sequence
  Synthetic
GLFSVLGSVAKHLLPHVVPVIAEKL

SEQ ID NO: 3037 - protein, 36 aa, Artificial Sequence
  Synthetic
QCDKAAAECFARNKKTYSLKYQFYPNMFCKGKKPKC

SEQ ID NO: 3038 - protein, 27 aa, Artificial Sequence
  Synthetic
CANTLMEVWDTLVKYNDGDAKVNKPWL

SEQ ID NO: 3039 - protein, 21 aa, Artificial Sequence
  Synthetic
KDIKEFLQSFIRIVQMFINTS

SEQ ID NO: 3040 - protein, 19 aa, Artificial Sequence
  Synthetic
AKNALQKFIEEMKKIKNRP

SEQ ID NO: 3041 - protein, 20 aa, Artificial Sequence
  Synthetic
TFTQFWSRLCHHAQSLQCLE

SEQ ID NO: 3042 - protein, 36 aa, Artificial Sequence
  Synthetic
RDCAGYMRECKEKLCCSGYVCSSRWKWRVLPAPWRR

SEQ ID NO: 3043 - protein, 36 aa, Artificial Sequence
  Synthetic
RDCAGYMRECKEKLCCSGYVRSSRWKWCVLPAPWRR

SEQ ID NO: 3044 - protein, 34 aa, Artificial Sequence
  Synthetic
FQGCLGTCFNYTKTNNNMVKEHKCCDHQNLCNKP

SEQ ID NO: 3045 - protein, 14 aa, Artificial Sequence
  Synthetic
EKLKRVASTFLQKN

SEQ ID NO: 3046 - protein, 29 aa, Artificial Sequence
  Synthetic
ADKLTDFINSVMDQLATLGFRNGVDAGLV

SEQ ID NO: 3047 - protein, 20 aa, Artificial Sequence
  Synthetic
NGCSRCCSYAGEAVQTQPGH

SEQ ID NO: 3048 - protein, 41 aa, Artificial Sequence
  Synthetic
KECLHTCDTCAKAQGKRGNCASEMLKSTRPQGWAVAAFQMG

SEQ ID NO: 3049 - protein, 25 aa, Artificial Sequence
  Synthetic
ITTVVRVITDVIDAAVAAGKIFKKP

SEQ ID NO: 3050 - protein, 18 aa, Artificial Sequence
  Synthetic
AKKAVGKCDDFKCNCIKL

SEQ ID NO: 3051 - protein, 27 aa, Artificial Sequence
  Synthetic
SARKLLQDIMNRQQGERNQEQGAKVRL

SEQ ID NO: 3052 - protein, 27 aa, Artificial Sequence
  Synthetic
SARKLLQDIMNRQQGERNQEQGAKVRL

SEQ ID NO: 3053 - protein, 15 aa, Artificial Sequence
  Synthetic
IDYIRDICQKVLKEL

SEQ ID NO: 3054 - protein, 24 aa, Artificial Sequence
  Synthetic
YKCGARIGRNCFCLQKGVIYKREN

SEQ ID NO: 3055 - protein, 23 aa, Artificial Sequence
  Synthetic
SFPSVLSSCCKGMSHGQHFHTHT

SEQ ID NO: 3056 - protein, 12 aa, Artificial Sequence
  Synthetic
INAVSTLVHHFG

SEQ ID NO: 3057 - protein, 12 aa, Artificial Sequence
  Synthetic
INAVSTLVHHFG

SEQ ID NO: 3058 - protein, 16 aa, Artificial Sequence
  Synthetic
KLLKTVAKQAAKKQME

SEQ ID NO: 3059 - protein, 23 aa, Artificial Sequence
  Synthetic
MGGLIKAATKALPAAFCAITKKC

SEQ ID NO: 3060 - protein, 26 aa, Artificial Sequence
  Synthetic
VASGINTWAKDLKDIAEKEEREKASL

SEQ ID NO: 3061 - protein, 42 aa, Artificial Sequence
  Synthetic
KAVEQVMNAFSKLQEKGVYKAMSEFDIFINYIEAYMTMKIQN

SEQ ID NO: 3062 - protein, 20 aa, Artificial Sequence
  Synthetic
RGCSRCCSYAGEAVQTQPGH

SEQ ID NO: 3063 - protein, 23 aa, Artificial Sequence
  Synthetic
DHVLDLLEDACDGLYDHLVSSKK

SEQ ID NO: 3064 - protein, 39 aa, Artificial Sequence
  Synthetic
GGGGGGGARRMKGLAKKAMGKGCFGHKLDRIGSTSGLGC

SEQ ID NO: 3065 - protein, 27 aa, Artificial Sequence
  Synthetic
VRSAGTSLVNFFSSLMNLEEKPAPAAK

SEQ ID NO: 3066 - protein, 35 aa, Artificial Sequence
  Synthetic
ECDRVAATCFRDNLNTYDKKYRKYPPSQCTGTEQC

SEQ ID NO: 3067 - protein, 22 aa, Artificial Sequence
  Synthetic
RLGRQLHNIVDKPRQNFNDPRF

SEQ ID NO: 3068 - protein, 31 aa, Artificial Sequence
  Synthetic
AWGLWSSVVKSWGFRAGETEAPISALSSAHA

SEQ ID NO: 3069 - protein, 26 aa, Artificial Sequence
  Synthetic
CWGPCTGGFRQIGTCGLPRVRCCKKK

SEQ ID NO: 3070 - protein, 17 aa, Artificial Sequence
  Synthetic
RELPKVCRNIFSRVSLI

SEQ ID NO: 3071 - protein, 35 aa, Artificial Sequence
  Synthetic
VKRFKKFFRKLKKSVKKRVKKFFKKPRVIGVTIPF

SEQ ID NO: 3072 - protein, 29 aa, Artificial Sequence
  Synthetic
DCYGRYKSGARRGRNCFCLQKGVIYKREN

SEQ ID NO: 3073 - protein, 32 aa, Artificial Sequence
  Synthetic
SKIPELFRDFARSLSAPIIDSFDEAIETYKLF

SEQ ID NO: 3074 - protein, 28 aa, Artificial Sequence
  Synthetic
DNVEHAWNDAFDKMYYVIFANLDGHPVA

SEQ ID NO: 3075 - protein, 25 aa, Artificial Sequence
  Synthetic
QECQDCCKNAGHNGGTCMFFKCKCA

SEQ ID NO: 3076 - protein, 17 aa, Artificial Sequence
  Synthetic
FLNKWITFCQSIYSTLT

SEQ ID NO: 3077 - protein, 25 aa, Artificial Sequence
  Synthetic
VKKAGTDLVNFLSYFVELRTQPATQ

SEQ ID NO: 3078 - protein, 26 aa, Artificial Sequence
  Synthetic
QECQDCCKNAGHNGGTCVYYKCKCNP

SEQ ID NO: 3079 - protein, 20 aa, Artificial Sequence
  Synthetic
IAQYFSALRHYINLVTRQRY

SEQ ID NO: 3080 - protein, 32 aa, Artificial Sequence
  Synthetic
QRCNRWCHNGCGNGKGGYYKSMSHGGQCHYYC

SEQ ID NO: 3081 - protein, 26 aa, Artificial Sequence
  Synthetic
QLVKQLLQEWSIMKLWVTLLPEFTNF

SEQ ID NO: 3082 - protein, 30 aa, Artificial Sequence
  Synthetic
RFLEGVISTIKDFAGKVCCSVSVNFCCPTA

SEQ ID NO: 3083 - protein, 22 aa, Artificial Sequence
  Synthetic
YDDFVKHAEEVQKKLHEAATKQ

SEQ ID NO: 3084 - protein, 29 aa, Artificial Sequence
  Synthetic
EEANDAVESCDQACSSFCNVHVGAATVVA

SEQ ID NO: 3085 - protein, 29 aa, Artificial Sequence
  Synthetic
EEANDAVESCDQACSSFCSVHVGSATVVA

SEQ ID NO: 3086 - protein, 34 aa, Artificial Sequence
  Synthetic
KSYANWGSSAEKTFNAGNLELAGKFPGETRSCFN

SEQ ID NO: 3087 - protein, 16 aa, Artificial Sequence
  Synthetic
DLIQLIHKLLKVRDYD

SEQ ID NO: 3088 - protein, 27 aa, Artificial Sequence
  Synthetic
DMCEILSSVLSVAYRTQYSRMEREKGV

SEQ ID NO: 3089 - protein, 36 aa, Artificial Sequence
  Synthetic
RDCAGYMRECKEKLCCSGYVCSSRWKRCVLPAPWRR

SEQ ID NO: 3090 - protein, 21 aa, Artificial Sequence
  Synthetic
GLLGSLFGAGKKVACALSGLC

SEQ ID NO: 3091 - protein, 40 aa, Artificial Sequence
  Synthetic
GGVHRCYEPCEKKKCRLPHKCINGRCTCYVGRNVCAISSH

SEQ ID NO: 3092 - protein, 40 aa, Artificial Sequence; identical to SEQ ID NO: 3091
  Synthetic

SEQ ID NO: 3093 - protein, 11 aa, Artificial Sequence
  Synthetic
GRGGASNYVRL

SEQ ID NO: 3094 - protein, 11 aa, Artificial Sequence
  Synthetic
GRGGASNYVRL

SEQ ID NO: 3095 - protein, 11 aa, Artificial Sequence
  Synthetic
GRGGASNYVRL

SEQ ID NO: 3096 - protein, 11 aa, Artificial Sequence
  Synthetic
GRGGASNYVRL

SEQ ID NO: 3097 - protein, 11 aa, Artificial Sequence
  Synthetic
GRGGASNYVRL

SEQ ID NO: 3098 - protein, 11 aa, Artificial Sequence
  Synthetic
GRGGASNYVRL

SEQ ID NO: 3099 - protein, 11 aa, Artificial Sequence
  Synthetic
GRGGASNYVRL

SEQ ID NO: 3100 - protein, 11 aa, Artificial Sequence
  Synthetic
GRGGASNYVRL

SEQ ID NO: 3101 - protein, 14 aa, Artificial Sequence
  Synthetic
IRSILDYISKLLGE

SEQ ID NO: 3102 - protein, 24 aa, Artificial Sequence
  Synthetic
DNVAAAWTHALDNVYTAVFQIVTA

SEQ ID NO: 3103 - protein, 34 aa, Artificial Sequence
  Synthetic
TCSKLVSSLVEIADQLDDDLNASPGDLCKFVYFC

SEQ ID NO: 3104 - protein, 16 aa, Artificial Sequence
  Synthetic
KVLKTVAKQAAKKQME

SEQ ID NO: 3105 - protein, 42 aa, Artificial Sequence
  Synthetic
IADAVTCAKRVVSDPQGIRAWVAWRNHCQNRDVSQYVQGCGV

SEQ ID NO: 3106 - protein, 40 aa, Artificial Sequence
  Synthetic
KKGGGHCQAYIGRSHGRLAIENYCCCNNYSNSPISSPVMN

SEQ ID NO: 3107 - protein, 14 aa, Artificial Sequence
  Synthetic
LESLAKGIVSGIQA

SEQ ID NO: 3108 - protein, 38 aa, Artificial Sequence
  Synthetic
FNPCERGGDRGCTVFCKRKLVTRGECRDEGCWCCPGQV

SEQ ID NO: 3109 - protein, 21 aa, Artificial Sequence
  Synthetic
EFIENFQDIARRLHREEKWEK

SEQ ID NO: 3110 - protein, 24 aa, Artificial Sequence
  Synthetic
AVSQCTNACSNFCTKGSAKAVETA

SEQ ID NO: 3111 - protein, 29 aa, Artificial Sequence
  Synthetic
FHDCEDAARELQSQIQEARADLTRRGLRF

SEQ ID NO: 3112 - protein, 18 aa, Artificial Sequence
  Synthetic
KFLAEIIDTCNERLDEIL

SEQ ID NO: 3113 - protein, 39 aa, Artificial Sequence
  Synthetic
EYLGDLARKFKCTISWNYDIRFIVQYKVQRVILITHLNV

SEQ ID NO: 3114 - protein, 39 aa, Artificial Sequence
  Synthetic
KCMTGICKKVDSHPTCFCGGCSNANDVSLDTLISQLPHN

SEQ ID NO: 3115 - protein, 37 aa, Artificial Sequence
  Synthetic
NRLEGWLARAERMVKNTFMPTDVDPEAFGHQHKELAA

SEQ ID NO: 3116 - protein, 26 aa, Artificial Sequence
  Synthetic
TTAVSALRSCVSILTTMVAYKMVVGN

SEQ ID NO: 3117 - protein, 28 aa, Artificial Sequence
  Synthetic
VTTYADFIDSLKTFLTDIPFECKKPGQK

SEQ ID NO: 3118 - protein, 20 aa, Artificial Sequence
  Synthetic
RHFGNACEKIVHTCQTGEST

SEQ ID NO: 3119 - protein, 24 aa, Artificial Sequence
  Synthetic
YKSGARIGRNCFCLQKGVIYKREN

SEQ ID NO: 3120 - protein, 12 aa, Artificial Sequence
  Synthetic
ANANSFISQVNK

SEQ ID NO: 3121 - protein, 17 aa, Artificial Sequence
  Synthetic
FFQEFITFCQRLIQLTR

SEQ ID NO: 3122 - protein, 17 aa, Artificial Sequence
  Synthetic
FLNKWITFCQSIYSTMT

SEQ ID NO: 3123 - protein, 36 aa, Artificial Sequence
  Synthetic
RNCAGYMRECKEKLCCSGYVCSSRWKWCVLPAPWRR

SEQ ID NO: 3124 - protein, 21 aa, Artificial Sequence
  Synthetic
IESAWNVIEEFLKTVKSQMNM

SEQ ID NO: 3125 - protein, 18 aa, Artificial Sequence
  Synthetic
RDAGRLLRSLKKLKLTTH

SEQ ID NO: 3126 - protein, 23 aa, Artificial Sequence
  Synthetic
NRFLNNISSLFERMTSFFGGAGP

SEQ ID NO: 3127 - protein, 17 aa, Artificial Sequence
  Synthetic
LFDIIKKVASVVGLASP

SEQ ID NO: 3128 - protein, 18 aa, Artificial Sequence
  Synthetic
LQSFLELAYRVLRYLAEP

SEQ ID NO: 3129 - protein, 24 aa, Artificial Sequence
  Synthetic
GLFGVLGSIAKHVLPHVVPVIAEK

SEQ ID NO: 3130 - protein, 20 aa, Artificial Sequence
  Synthetic
LSRYYASLRHYLNLVTRQRY

SEQ ID NO: 3131 - protein, 20 aa, Artificial Sequence
  Synthetic
LSRYYASLRHYLNLVTRQRY

SEQ ID NO: 3132 - protein, 14 aa, Artificial Sequence
  Synthetic
CKSYYSIVADCCNQ

SEQ ID NO: 3133 - protein, 14 aa, Artificial Sequence
  Synthetic
CKSYYSIVADCCNQ

SEQ ID NO: 3134 - protein, 14 aa, Artificial Sequence
  Synthetic
CKSYYSIVADCCNQ

SEQ ID NO: 3135 - protein, 14 aa, Artificial Sequence
  Synthetic
CKSYYSIVADCCNQ

SEQ ID NO: 3136 - protein, 14 aa, Artificial Sequence
  Synthetic
CKSYYSIVADCCNQ

SEQ ID NO: 3137 - protein, 14 aa, Artificial Sequence
  Synthetic
CKSYYSIVADCCNQ

SEQ ID NO: 3138 - protein, 14 aa, Artificial Sequence
  Synthetic
CKSYYSIVADCCNQ

SEQ ID NO: 3139 - protein, 14 aa, Artificial Sequence
  Synthetic
CKSYYSIVADCCNQ

SEQ ID NO: 3140 - protein, 14 aa, Artificial Sequence
  Synthetic
CKSYYSIVADCCNQ

SEQ ID NO: 3141 - protein, 18 aa, Artificial Sequence
  Synthetic
LQSFLELAYRVLRYLAEP

SEQ ID NO: 3142 - protein, 42 aa, Artificial Sequence
  Synthetic
IADAVACAKRVVSDPQGIRAWVAWRNHCQNKDVSQYVKGCGV

SEQ ID NO: 3143 - protein, 42 aa, Artificial Sequence
  Synthetic
IADAVACAKRVVSDPQGIRAWVAWKKHCQNRDVSQYVEGCGV

SEQ ID NO: 3144 - protein, 42 aa, Artificial Sequence
  Synthetic
IADAVACAKRVVSDPQGIRAWVAWRNHCQNRDVSQYVKGCGV

SEQ ID NO: 3145 - protein, 42 aa, Artificial Sequence; identical to SEQ ID NO: 3142
  Synthetic

SEQ ID NO: 3146 - protein, 42 aa, Artificial Sequence; identical to SEQ ID NO: 3142
  Synthetic

SEQ ID NO: 3147 - protein, 42 aa, Artificial Sequence; identical to SEQ ID NO: 3143
  Synthetic

SEQ ID NO: 3148 - protein, 42 aa, Artificial Sequence; identical to SEQ ID NO: 3142
  Synthetic

SEQ ID NO: 3149 - protein, 25 aa, Artificial Sequence
  Synthetic
VLSAYWRNLNNFHRFSGMGFGPETP

SEQ ID NO: 3150 - protein, 20 aa, Artificial Sequence
  Synthetic
MAQYAAELRRYINMLTRPRY

SEQ ID NO: 3151 - protein, 20 aa, Artificial Sequence
  Synthetic
MAQYAAELRRYINMLTRPRY

SEQ ID NO: 3152 - protein, 20 aa, Artificial Sequence
  Synthetic
MAQYAAELRRYINMLTRPRY

SEQ ID NO: 3153 - protein, 16 aa, Artificial Sequence
  Synthetic
WTHGLDNIFGMIFAHL

SEQ ID NO: 3154 - protein, 27 aa, Artificial Sequence
  Synthetic
GQEGRQMLQKARNLPSMCGIRPQRCDF

SEQ ID NO: 3155 - protein, 38 aa, Artificial Sequence; identical to SEQ ID NO: 3025
  Synthetic

SEQ ID NO: 3156 - protein, 38 aa, Artificial Sequence; identical to SEQ ID NO: 3025
  Synthetic

SEQ ID NO: 3157 - protein, 38 aa, Artificial Sequence; identical to SEQ ID NO: 3025
  Synthetic

SEQ ID NO: 3158 - protein, 38 aa, Artificial Sequence; identical to SEQ ID NO: 3025
  Synthetic

SEQ ID NO: 3159 - protein, 23 aa, Artificial Sequence
  Synthetic
CNEGWDKCASYYSPIAECCRKKK

SEQ ID NO: 3160 - protein, 37 aa, Artificial Sequence
  Synthetic
RCLSPMNHLCHKDADCSGKKRCCSSACGRDCRDPVRG

SEQ ID NO: 3161 - protein, 14 aa, Artificial Sequence
  Synthetic
EAVKKLLEALSHLV

SEQ ID NO: 3162 - protein, 26 aa, Artificial Sequence
  Synthetic
RDFRGVVDSCCRKSCSFSTLRAYCDS

SEQ ID NO: 3163 - protein, 27 aa, Artificial Sequence
  Synthetic
KELGKVIEGFISGVEDIISGASGTVRP

SEQ ID NO: 3164 - protein, 24 aa, Artificial Sequence
  Synthetic
AVDRCNEACYRFCTNEAEIVTVAS

SEQ ID NO: 3165 - protein, 24 aa, Artificial Sequence
  Synthetic
RSVYSAADKVANALRFGGKNIILL

SEQ ID NO: 3166 - protein, 33 aa, Artificial Sequence
  Synthetic
EDIEKLIEEIKKKLAGYMDVTGEQNEEEEKKEL

SEQ ID NO: 3167 - protein, 24 aa, Artificial Sequence
  Synthetic
YKSGARIGRNCFCLQKGVIYKREN

SEQ ID NO: 3168 - protein, 24 aa, Artificial Sequence
  Synthetic
RKLYHRVGTCIQNIFYQLLLTVNY

SEQ ID NO: 3169 - protein, 37 aa, Artificial Sequence
  Synthetic
RCLSPMNHLCHKDSDCSGKKRCCHSACGRDCRDPARG

SEQ ID NO: 3170 - protein, 37 aa, Artificial Sequence; identical to SEQ ID NO: 3169
  Synthetic

SEQ ID NO: 3171 - protein, 37 aa, Artificial Sequence; identical to SEQ ID NO: 3169
  Synthetic

SEQ ID NO: 3172 - protein, 34 aa, Artificial Sequence
  Synthetic
WSRWWSSCWRLWTRIYLVELQLLNLAPGVSSGVK

SEQ ID NO: 3173 - protein, 34 aa, Artificial Sequence
  Synthetic
RALKQADYLLDNVVRANLKGALPSATPVPPGSYT

SEQ ID NO: 3174 - protein, 42 aa, Artificial Sequence
  Synthetic
KAVEQVKNAFSKLQEKGVYKAMSEFDIFINYIEAYMTMKIQN

SEQ ID NO: 3175 - protein, 42 aa, Artificial Sequence; identical to SEQ ID NO: 3174
  Synthetic

SEQ ID NO: 3176 - protein, 42 aa, Artificial Sequence; identical to SEQ ID NO: 3174
  Synthetic

SEQ ID NO: 3177 - protein, 36 aa, Artificial Sequence
  Synthetic
QCDKAAAECFARNKKSYSLKYQFYPNKFCKGKTPSC

SEQ ID NO: 3178 - protein, 35 aa, Artificial Sequence
  Synthetic
HEVLGAFWKMARVGERASPYVSLACILMAISQFNS

SEQ ID NO: 3179 - protein, 31 aa, Artificial Sequence
  Synthetic
MARGVAQLNTYYVNLTNGDAIVEYNVTLYHY

SEQ ID NO: 3180 - protein, 14 aa, Artificial Sequence
  Synthetic
FDKYARAIQTVGKK

SEQ ID NO: 3181 - protein, 22 aa, Artificial Sequence
  Synthetic
LANIYEDYRSGFKSGIGARPGR

SEQ ID NO: 3182 - protein, 12 aa, Artificial Sequence
  Synthetic
GQAALNAASEAL

SEQ ID NO: 3183 - protein, 20 aa, Artificial Sequence
  Synthetic
MAQYAADLRRYINMLTRPRY

SEQ ID NO: 3184 - protein, 33 aa, Artificial Sequence
  Synthetic
VEACESVADTVFNAVWTLGCRPFMNSQRSACIC

SEQ ID NO: 3185 - protein, 17 aa, Artificial Sequence
  Synthetic
AHTFATKLMKCIDDNLI

SEQ ID NO: 3186 - protein, 14 aa, Artificial Sequence
  Synthetic
EAVKKLLEALSHLV

SEQ ID NO: 3187 - protein, 15 aa, Artificial Sequence
  Synthetic
TQAWTNFKKWFKKMV

SEQ ID NO: 3188 - protein, 17 aa, Artificial Sequence
  Synthetic
KDLHTVVSAILQALGKK

SEQ ID NO: 3189 - protein, 41 aa, Artificial Sequence
  Synthetic
EFMQRALQDLRKTAYSLDARTESLLLQAERRALCACWPAGH

SEQ ID NO: 3190 - protein, 42 aa, Artificial Sequence
  Synthetic
CNRACGTCCARCNCVPPGTSGNTETCPCYASLTTHGNKRKCP

SEQ ID NO: 3191 - protein, 25 aa, Artificial Sequence
  Synthetic
GAVGILNSFLDEYLDIDIAKKLRHF

SEQ ID NO: 3192 - protein, 16 aa, Artificial Sequence
  Synthetic
KYLKSLFSHASEVVKP

SEQ ID NO: 3193 - protein, 23 aa, Artificial Sequence
  Synthetic
CNEGWEKCASYYSPIAECCRKKK

SEQ ID NO: 3194 - protein, 23 aa, Artificial Sequence
  Synthetic
CNEGWEKCASYYSPIAECCRKKK

SEQ ID NO: 3195 - protein, 25 aa, Artificial Sequence
  Synthetic
KGCSRCCSYAGEAVDHEVAAAKPNN

SEQ ID NO: 3196 - protein, 17 aa, Artificial Sequence
  Synthetic
GGNCDGVMRQCKCIRQC

SEQ ID NO: 3197 - protein, 12 aa, Artificial Sequence
  Synthetic
CGWVEAAYKGLV

SEQ ID NO: 3198 - protein, 20 aa, Artificial Sequence
  Synthetic
IMYLVRKIIKYCRKLKSCYE

SEQ ID NO: 3199 - protein, 20 aa, Artificial Sequence
  Synthetic
IMYLVRKIIKYCRKLKSCYE

SEQ ID NO: 3200 - protein, 24 aa, Artificial Sequence
  Synthetic
YKCGARIGRNCFCLQKGVIYKRED

SEQ ID NO: 3201 - protein, 36 aa, Artificial Sequence
  Synthetic
RDCAGYMRECKEKLCCSGYVCSSRWKWCVLPAPWRR

SEQ ID NO: 3202 - protein, 36 aa, Artificial Sequence; identical to SEQ ID NO: 3201
  Synthetic

SEQ ID NO: 3203 - protein, 36 aa, Artificial Sequence; identical to SEQ ID NO: 3201
  Synthetic

SEQ ID NO: 3204 - protein, 36 aa, Artificial Sequence; identical to SEQ ID NO: 3201
  Synthetic

SEQ ID NO: 3205 - protein, 36 aa, Artificial Sequence; identical to SEQ ID NO: 3201
  Synthetic

SEQ ID NO: 3206 - protein, 36 aa, Artificial Sequence; identical to SEQ ID NO: 3201
  Synthetic

SEQ ID NO: 3207 - protein, 36 aa, Artificial Sequence; identical to SEQ ID NO: 3201
  Synthetic

SEQ ID NO: 3208 - protein, 36 aa, Artificial Sequence; identical to SEQ ID NO: 3201
  Synthetic

SEQ ID NO: 3209 - protein, 36 aa, Artificial Sequence; identical to SEQ ID NO: 3201
  Synthetic

SEQ ID NO: 3210 - protein, 36 aa, Artificial Sequence; identical to SEQ ID NO: 3201
  Synthetic

SEQ ID NO: 3211 - protein, 36 aa, Artificial Sequence; identical to SEQ ID NO: 3201
  Synthetic

SEQ ID NO: 3212 - protein, 36 aa, Artificial Sequence; identical to SEQ ID NO: 3201
  Synthetic

SEQ ID NO: 3213 - protein, 36 aa, Artificial Sequence; identical to SEQ ID NO: 3201
  Synthetic

SEQ ID NO: 3214 - protein, 36 aa, Artificial Sequence; identical to SEQ ID NO: 3201
  Synthetic

SEQ ID NO: 3215 - protein, 36 aa, Artificial Sequence; identical to SEQ ID NO: 3201
  Synthetic

SEQ ID NO: 3216 - protein, 36 aa, Artificial Sequence; identical to SEQ ID NO: 3201
  Synthetic

SEQ ID NO: 3217 - protein, 36 aa, Artificial Sequence; identical to SEQ ID NO: 3201
  Synthetic

SEQ ID NO: 3218 - protein, 36 aa, Artificial Sequence
  Synthetic
RDCAGYMRECKEKLCCSGYVCSSRWKWCVLSAPWRR

SEQ ID NO: 3219 - protein, 36 aa, Artificial Sequence
  Synthetic
RDCAGYMRECKEKLCCSGYVCPSRWKWCVLPAPWRR

SEQ ID NO: 3220 - protein, 36 aa, Artificial Sequence
  Synthetic
RDCAGYMRECKEKLCCSGYVCSSRWKWCVSPAPWRR

SEQ ID NO: 3221 - protein, 21 aa, Artificial Sequence
  Synthetic
TVVEFLNKWITFCQSIYSTLT

SEQ ID NO: 3222 - protein, 21 aa, Artificial Sequence
  Synthetic
TVVEFLNKWITFCQSIYSTMT

SEQ ID NO: 3223 - protein, 34 aa, Artificial Sequence
  Synthetic
INNFAACGKAWPEDKKRKVNKCYICDNELTLCTR

SEQ ID NO: 3224 - protein, 13 aa, Artificial Sequence
  Synthetic
VTAAIRKVGTGAA

SEQ ID NO: 3225 - protein, 12 aa, Artificial Sequence
  Synthetic
KALREYCSVVRN

SEQ ID NO: 3226 - protein, 20 aa, Artificial Sequence
  Synthetic
AVEFLNKWITFCQSIYSTMT

SEQ ID NO: 3227 - protein, 11 aa, Artificial Sequence
  Synthetic
ISAISAIAHHL

SEQ ID NO: 3228 - protein, 38 aa, Artificial Sequence
  Synthetic
IYGGCGGNANNFSSYYECHIKCFGPRAIIFPEDSPKEN

SEQ ID NO: 3229 - protein, 33 aa, Artificial Sequence
  Synthetic
SKILRSLQAFLAIAARVFAHGAATLTEPLVPTA

SEQ ID NO: 3230 - protein, 37 aa, Artificial Sequence
  Synthetic
RCLSPMNHLCHKDADCSGKKRCCPSACGRDCRDPARG

SEQ ID NO: 3231 - protein, 35 aa, Artificial Sequence
  Synthetic
VKRFKKFFKKLKNNVKKRVKKFFRKPRVIGVTIPF

SEQ ID NO: 3232 - protein, 42 aa, Artificial Sequence
  Synthetic
CYGAAGTCGRIVCDCDRTAALCFGDSEYIERHKNIDTKRHCQ

SEQ ID NO: 3233 - protein, 24 aa, Artificial Sequence
  Synthetic
YKSGARIGRNCFCLQKGVIYKREN

SEQ ID NO: 3234 - protein, 14 aa, Artificial Sequence
  Synthetic
LLHHGLNCAKGVLA

SEQ ID NO: 3235 - protein, 21 aa, Artificial Sequence
  Synthetic
GRKCCSTWDKCHPVHLPCPSS

SEQ ID NO: 3236 - protein, 37 aa, Artificial Sequence; identical to SEQ ID NO: 3169
  Synthetic

SEQ ID NO: 3237 - protein, 37 aa, Artificial Sequence; identical to SEQ ID NO: 3169
  Synthetic

SEQ ID NO: 3238 - protein, 21 aa, Artificial Sequence
  Synthetic
TVVEFLNKWITFCQSIYSTLT

SEQ ID NO: 3239 - protein, 19 aa, Artificial Sequence
  Synthetic
EAIKSLLKAVSQRRSKRAP

SEQ ID NO: 3240 - protein, 42 aa, Artificial Sequence
  Synthetic
CYGAAGTCGRIVCDCDRTAALCFGDSEYIGAHKNIDTKRHCQ

SEQ ID NO: 3241 - protein, 20 aa, Artificial Sequence
  Synthetic
LAEQLMEKIKNLWYKRALGY

SEQ ID NO: 3242 - protein, 42 aa, Artificial Sequence
  Synthetic
CYGAAGTCARIVCDCDRTAALCFGDSEYIEGHKRIDTKRYCQ

SEQ ID NO: 3243 - protein, 22 aa, Artificial Sequence
  Synthetic
AFNAIAKGVAAMKKAKCKHKSG

SEQ ID NO: 3244 - protein, 22 aa, Artificial Sequence
  Synthetic
AFNAIAKGVAAMKKAKCKHKSG

SEQ ID NO: 3245 - protein, 21 aa, Artificial Sequence
  Synthetic
KNINEFLKSFIHIVQMFINPS

SEQ ID NO: 3246 - protein, 30 aa, Artificial Sequence
  Synthetic
LDSFTSVINSAYTFFAVIQTKYSQSSSHNL

SEQ ID NO: 3247 - protein, 13 aa, Artificial Sequence
  Synthetic
ERYANYGETLGNN

SEQ ID NO: 3248 - protein, 22 aa, Artificial Sequence
  Synthetic
WYSFLEELHSAFQQIAGEAESK

SEQ ID NO: 3249 - protein, 36 aa, Artificial Sequence
  Synthetic
RDCAGYMRECNEKLCCSGYVCSSRWKWCVLPAPWRR

SEQ ID NO: 3250 - protein, 24 aa, Artificial Sequence
  Synthetic
YKSGARIGRNCFCLQKGVIYKRED

SEQ ID NO: 3251 - protein, 27 aa, Artificial Sequence
  Synthetic
GSCASVCRKAIGVAAGKCINGRCVCYP

SEQ ID NO: 3252 - protein, 21 aa, Artificial Sequence
  Synthetic
SSWPHLLREILRAARLEGPAG

SEQ ID NO: 3253 - protein, 24 aa, Artificial Sequence
  Synthetic
YKSGTRIGRNCFCLQKGVIYKREN

SEQ ID NO: 3254 - protein, 24 aa, Artificial Sequence
  Synthetic
YKSGTRIGRNCFCLQKGVIYKREN

SEQ ID NO: 3255 - protein, 24 aa, Artificial Sequence
  Synthetic
YKSGTRIGRNCFCLQKGVIYKREN

SEQ ID NO: 3256 - protein, 24 aa, Artificial Sequence
  Synthetic
ILDAMGKAWNAVGNSISRYYCSAE

SEQ ID NO: 3257 - protein, 26 aa, Artificial Sequence
  Synthetic
FAYCNAGWEKCLAVYTPVASCCRKKK

SEQ ID NO: 3258 - protein, 22 aa, Artificial Sequence
  Synthetic
RGLLSGILGAGKHIVCGLSGLC

SEQ ID NO: 3259 - protein, 22 aa, Artificial Sequence
  Synthetic
RGLLSGILGAGKHIVCGLSGLC

SEQ ID NO: 3260 - protein, 34 aa, Artificial Sequence
  Synthetic
KQCEEIANKVIKPIKEALEQGVTSEDVCKKILAC

SEQ ID NO: 3261 - protein, 40 aa, Artificial Sequence
  Synthetic
WMNLLTTGIAAVSILLYLSATIILPNVLRLLVARAIIVRV

SEQ ID NO: 3262 - protein, 36 aa, Artificial Sequence
  Synthetic
SKALNAAKNFVSEKIGATPSEAGQIPFDEFMDVLYS

SEQ ID NO: 3263 - protein, 24 aa, Artificial Sequence
  Synthetic
DDYTKCCNSFDAFLMCGFLLSKES

SEQ ID NO: 3264 - protein, 21 aa, Artificial Sequence
  Synthetic
NAVEFLNKWITFCQSIYSTMT

SEQ ID NO: 3265 - protein, 21 aa, Artificial Sequence
  Synthetic
NAVEFLNKWITFCQSIYSTMT

SEQ ID NO: 3266 - protein, 21 aa, Artificial Sequence
  Synthetic
NAVEFLNKWITFCQSIYSTMT

SEQ ID NO: 3267 - protein, 21 aa, Artificial Sequence
  Synthetic
NAVEFLNKWITFCQSIYSTMT

SEQ ID NO: 3268 - protein, 21 aa, Artificial Sequence
  Synthetic
NAVEFLNKWITFCQSIYSTMT

SEQ ID NO: 3269 - protein, 21 aa, Artificial Sequence
  Synthetic
NAVEFLNKWITFCQSIYSTMT

SEQ ID NO: 3270 - protein, 21 aa, Artificial Sequence
  Synthetic
NAVEFLNKWITFCQSIYSTMT

SEQ ID NO: 3271 - protein, 21 aa, Artificial Sequence
  Synthetic
NAVEFLNKWITFCQSIYSTMT

SEQ ID NO: 3272 - protein, 18 aa, Artificial Sequence
  Synthetic
WTQFMQVCERLAKNANPV

SEQ ID NO: 3273 - protein, 34 aa, Artificial Sequence
  Synthetic
ELGHKIMKNLENTVKEIIKYLKSLFPPASEVVKP

SEQ ID NO: 3274 - protein, 20 aa, Artificial Sequence
  Synthetic
MTKYLTALRHYINLVTRQRY

SEQ ID NO: 3275 - protein, 28 aa, Artificial Sequence
  Synthetic
VCKDLINIMEGLERQVRQCACGEQVWLF

SEQ ID NO: 3276 - protein, 37 aa, Artificial Sequence
  Synthetic
ITKASKCAKKIYKRHKFQAWYGWRNHCQGTLPDISKC

SEQ ID NO: 3277 - protein, 16 aa, Artificial Sequence
  Synthetic
IRNIFSQILHAATSLS

SEQ ID NO: 3278 - protein, 14 aa, Artificial Sequence
  Synthetic
LNSCGKNVPQGFVC

SEQ ID NO: 3279 - protein, 27 aa, Artificial Sequence
  Synthetic
IQRIIDTFGTIINEISNIIRKIIPDLQ

SEQ ID NO: 3280 - protein, 24 aa, Artificial Sequence
  Synthetic
YKSGARIGRNCFCLQKGVIYKREN

SEQ ID NO: 3281 - protein, 24 aa, Artificial Sequence
  Synthetic
YKSGARIGRNCFCLQKGVIYKREN

SEQ ID NO: 3282 - protein, 24 aa, Artificial Sequence
  Synthetic
YKSGARIGRNCFCLQKGVIYKREN

SEQ ID NO: 3283 - protein, 24 aa, Artificial Sequence
  Synthetic
YKSGARIGRNCFCLQKGVIYKREN

SEQ ID NO: 3284 - protein, 42 aa, Artificial Sequence
  Synthetic
KWVQDYIAKLDQRTQQKQNSTAPQTSKPLNIRFTTQDPKNRS

SEQ ID NO: 3285 - protein, 42 aa, Artificial Sequence; identical to SEQ ID NO: 3105
  Synthetic

SEQ ID NO: 3286 - protein, 42 aa, Artificial Sequence; identical to SEQ ID NO: 3105
  Synthetic

SEQ ID NO: 3287 - protein, 36 aa, Artificial Sequence
  Synthetic
GAFCGQACSSVKCPKKCFCHPEEKVCYREMRTKERD

SEQ ID NO: 3288 - protein, 24 aa, Artificial Sequence
  Synthetic
WLAGCPSGWHNCKKHKPTIGWCCK

SEQ ID NO: 3289 - protein, 11 aa, Artificial Sequence
  Synthetic
LRELEELLEDY

SEQ ID NO: 3290 - protein, 15 aa, Artificial Sequence
  Synthetic
YHTCCQNGLKCVRYP

SEQ ID NO: 3291 - protein, 21 aa, Artificial Sequence
  Synthetic
NRFGSRIDGIYNGLCRDSIWK

SEQ ID NO: 3292 - protein, 23 aa, Artificial Sequence
  Synthetic
GQTLGKFLQDILWEEAEETLADE

SEQ ID NO: 3293 - protein, 23 aa, Artificial Sequence
  Synthetic
GQTLGKFLQDILWEEAEETLANE

SEQ ID NO: 3294 - protein, 13 aa, Artificial Sequence
  Synthetic
QYSRLGDKWARNK

SEQ ID NO: 3295 - protein, 34 aa, Artificial Sequence
  Synthetic
STIISNITDIVRELDVHIFTRETSTVANGGPVPI

SEQ ID NO: 3296 - protein, 31 aa, Artificial Sequence
  Synthetic
DILDKMENAIHKAAQAGIGLAKPIENMILPK

SEQ ID NO: 3297 - protein, 31 aa, Artificial Sequence
  Synthetic
DFVDKLKKFAHTDNAEPDQLRREKAPNNDNY

SEQ ID NO: 3298 - protein, 42 aa, Artificial Sequence
  Synthetic
IQGAARALGSGLNAGRAAGIPKACGVNIPYKISTSTNCKTVR

SEQ ID NO: 3299 - protein, 11 aa, Artificial Sequence
  Synthetic
ISAISAIADHL

SEQ ID NO: 3300 - protein, 30 aa, Artificial Sequence
  Synthetic
MQQMQQMMQYLPRMCGMSYPTECRMRPIFA

SEQ ID NO: 3301 - protein, 27 aa, Artificial Sequence
  Synthetic
VEHLVEGLRKCVNELGPEASEAVKKLL

SEQ ID NO: 3302 - protein, 18 aa, Artificial Sequence
  Synthetic
FQRFLETAYRALRHLTSL

SEQ ID NO: 3303 - protein, 26 aa, Artificial Sequence
  Synthetic
VLSHADEIARDLEEWIRHRYHESWLV

SEQ ID NO: 3304 - protein, 33 aa, Artificial Sequence
  Synthetic
LIRGLDTALRRMGDCQSRDATDGFPTIRVHLGV

SEQ ID NO: 3305 - protein, 29 aa, Artificial Sequence
  Synthetic
FHDCEDAARELQSQIVEARADLARRGLRF

SEQ ID NO: 3306 - protein, 19 aa, Artificial Sequence
  Synthetic
EFLSRWITFCQSIIATMTQ

SEQ ID NO: 3307 - protein, 17 aa, Artificial Sequence
  Synthetic
CKAFSKGGNACWCKGLR

SEQ ID NO: 3308 - protein, 16 aa, Artificial Sequence
  Synthetic
YRRGCSAATGCYRFTN

SEQ ID NO: 3309 - protein, 17 aa, Artificial Sequence
  Synthetic
LKNLMERFMQHVSHCQN

SEQ ID NO: 3310 - protein, 42 aa, Artificial Sequence
  Synthetic
IADAVACAKRVVSDPQGVRAWVAWRNHCQNKDVSQYVKGCGV

SEQ ID NO: 3311 - protein, 15 aa, Artificial Sequence
  Synthetic
RIVDAVREIIDDFCD

SEQ ID NO: 3312 - protein, 16 aa, Artificial Sequence
  Synthetic
NVAKKLVSHVAKKQLE

SEQ ID NO: 3313 - protein, 20 aa, Artificial Sequence
  Synthetic
VLDILKNAAKNILAHAAEQI

SEQ ID NO: 3314 - protein, 16 aa, Artificial Sequence
  Synthetic
DAKQWIKTMFKNWYQT

SEQ ID NO: 3315 - protein, 16 aa, Artificial Sequence
  Synthetic
GTNIWNEIRTWSNWKA

SEQ ID NO: 3316 - protein, 24 aa, Artificial Sequence
  Synthetic
ARTCIYTLLTNCTTCLNDNGIVCP

SEQ ID NO: 3317 - protein, 24 aa, Artificial Sequence
  Synthetic
MYGGCGGNANNFKTIVECHRTCVG

SEQ ID NO: 3318 - protein, 15 aa, Artificial Sequence
  Synthetic
VETILKNWLSIIQKK

SEQ ID NO: 3319 - protein, 26 aa, Artificial Sequence
  Synthetic
TTVRSVAQSAGYWLDPPEFDKAHGKK

SEQ ID NO: 3320 - protein, 29 aa, Artificial Sequence
  Synthetic
ETFCTNLINLLYRLFCLRASDERATENTY

SEQ ID NO: 3321 - protein, 27 aa, Artificial Sequence
  Synthetic
DAENAWNKAFEEMYKIVFANLSGNPVS

SEQ ID NO: 3322 - protein, 25 aa, Artificial Sequence
  Synthetic
SDIIDELKDAVKTVKETWSEVKQIG

SEQ ID NO: 3323 - protein, 17 aa, Artificial Sequence
  Synthetic
GGNCDGVIRQCKCIRQC

SEQ ID NO: 3324 - protein, 20 aa, Artificial Sequence
  Synthetic
ITEFLNKWITFCQSIFSTLT

SEQ ID NO: 3325 - protein, 20 aa, Artificial Sequence
  Synthetic
ITEFLNKWITFCQSIFSTLT

SEQ ID NO: 3326 - protein, 20 aa, Artificial Sequence
  Synthetic
ITEFLNKWITFCQSIFSTLT

SEQ ID NO: 3327 - protein, 20 aa, Artificial Sequence
  Synthetic
ITEFLNKWITFCQSIFSTLT

SEQ ID NO: 3328 - protein, 20 aa, Artificial Sequence
  Synthetic
ITEFLNKWITFCQSIFSTLT

SEQ ID NO: 3329 - protein, 20 aa, Artificial Sequence
  Synthetic
ITEFLNKWITFCQSIFSTLT

SEQ ID NO: 3330 - protein, 28 aa, Artificial Sequence
  Synthetic
DNVQTAFNKAFDTMYYVIFENLDGHTVN

SEQ ID NO: 3331 - protein, 25 aa, Artificial Sequence
  Synthetic
ERGFGCFRSCWKAGHDDKTCKSMCG

SEQ ID NO: 3332 - protein, 27 aa, Artificial Sequence
  Synthetic
KDLISVIEDLLTFFRAQMRKLVMNPKH

SEQ ID NO: 3333 - protein, 41 aa, Artificial Sequence
  Synthetic
GYYGDLAARLGYFPSSIVREDLTLKPGKIDMKTDQWDFYCQ

SEQ ID NO: 3334 - protein, 23 aa, Artificial Sequence
  Synthetic
LEDIWNSLSSVFTETQPVERIQR

SEQ ID NO: 3335 - protein, 18 aa, Artificial Sequence
  Synthetic
MKCCRNGCGKMGCTTPKF

SEQ ID NO: 3336 - protein, 25 aa, Artificial Sequence
  Synthetic
NALTFLKSLLEIFQKEKMRGMRGKI

SEQ ID NO: 3337 - protein, 25 aa, Artificial Sequence
  Synthetic
NALTFLKSLLEIFQKEKMRGMRGKI

SEQ ID NO: 3338 - protein, 25 aa, Artificial Sequence
  Synthetic
NALTFLKSLLEIFQKEKMRGMRGKI

SEQ ID NO: 3339 - protein, 25 aa, Artificial Sequence
  Synthetic
NALTFLKSLLEIFQKEKMRGMRGKI

SEQ ID NO: 3340 - protein, 31 aa, Artificial Sequence
  Synthetic
FQQVVDTLQSMVTNGPDTAQKDVDSINNNRC

SEQ ID NO: 3341 - protein, 22 aa, Artificial Sequence
  Synthetic
ALSRLQGALQDMLRQLDLSPGC

SEQ ID NO: 3342 - protein, 42 aa, Artificial Sequence
  Synthetic
SNIGEHAKSLYTDTVAVLTPYLQKIRENVTKMYQVYVESKQH

SEQ ID NO: 3343 - protein, 36 aa, Artificial Sequence
  Synthetic
RDCAGYMRECKEKLCCSGYVCSSGWKWCVLPAPWRR

SEQ ID NO: 3344 - protein, 26 aa, Artificial Sequence
  Synthetic
NAMIGVAKSVGKTALSTLACKIDKSC

SEQ ID NO: 3345 - protein, 11 aa, Artificial Sequence
  Synthetic
YGSYSGLGSSL

SEQ ID NO: 3346 - protein, 26 aa, Artificial Sequence
  Synthetic
EDIFDVVKTVVEVAEAMRDEKKKKEL

SEQ ID NO: 3347 - protein, 18 aa, Artificial Sequence
  Synthetic
AKKAVGKCDDFKCNCIKL

SEQ ID NO: 3348 - protein, 34 aa, Artificial Sequence
  Synthetic
MCQYLESWWRTMRSCRDSSGLSGPCPGTYGTCWT

SEQ ID NO: 3349 - protein, 30 aa, Artificial Sequence
  Synthetic
ARRWRRAFRRLRKIAPLIPTFVRLYPVGKK

SEQ ID NO: 3350 - protein, 16 aa, Artificial Sequence
  Synthetic
KVLKAVGKQAAKKQME

SEQ ID NO: 3351 - protein, 18 aa, Artificial Sequence
  Synthetic
LQSFLELAYRVLRYLAQP

SEQ ID NO: 3352 - protein, 13 aa, Artificial Sequence
  Synthetic
GKDLSKYLEGCHL

SEQ ID NO: 3353 - protein, 24 aa, Artificial Sequence
  Synthetic
YKNGARIGRNCFCLQKGVLYKKEN

SEQ ID NO: 3354 - protein, 25 aa, Artificial Sequence
  Synthetic
GLLSVLGSVAKHVLPHVVPVIAEKL

SEQ ID NO: 3355 - protein, 25 aa, Artificial Sequence
  Synthetic
GLLSVLGSVAKHVLPHVVPVIAEKL

SEQ ID NO: 3356 - protein, 22 aa, Artificial Sequence
  Synthetic
TVVDFLRRWIAFCQSIISTSPQ

SEQ ID NO: 3357 - protein, 29 aa, Artificial Sequence
  Synthetic
WRCIREALDEVARAVGIELASKPAAAASD

SEQ ID NO: 3358 - protein, 26 aa, Artificial Sequence
  Synthetic
RVQDALSGYCRNENPCCVRRVLMEDG

SEQ ID NO: 3359 - protein, 42 aa, Artificial Sequence
  Synthetic
GSFGNIFGHFLGRVGTRYISSLFNKKREERKSNHAYIIEDYN

SEQ ID NO: 3360 - protein, 22 aa, Artificial Sequence
  Synthetic
LFGVLAKVASHVVPAIAEHFQA

SEQ ID NO: 3361 - protein, 33 aa, Artificial Sequence
  Synthetic
RGVTTFWETVETLVSNGFISDRGHKWLMGHEKA

SEQ ID NO: 3362 - protein, 25 aa, Artificial Sequence
  Synthetic
EWAKVWTKLFYILYSCNHHNCANDI

SEQ ID NO: 3363 - protein, 32 aa, Artificial Sequence
  Synthetic
QRCNRWCHNGCGNGKGDYCKAMSHGGLCHCYC

SEQ ID NO: 3364 - protein, 12 aa, Artificial Sequence
  Synthetic
CGWVSRAWKGVV

SEQ ID NO: 3365 - protein, 24 aa, Artificial Sequence
  Synthetic
ESMKTLVQDMYYLIQYWRQADDTR

SEQ ID NO: 3366 - protein, 17 aa, Artificial Sequence
  Synthetic
FEEFADSACRIIEKIYA

SEQ ID NO: 3367 - protein, 34 aa, Artificial Sequence
  Synthetic
LANFIASLTAGALVLSAIGIALIIISKNDRVQRS

SEQ ID NO: 3368 - protein, 24 aa, Artificial Sequence
  Synthetic
IKEAMESLPKAVRDELEKAIAGGA

SEQ ID NO: 3369 - protein, 24 aa, Artificial Sequence
  Synthetic
IKEAMESLPKAVRDELEKAIAGGA

SEQ ID NO: 3370 - protein, 24 aa, Artificial Sequence
  Synthetic
IKEAMESLPKAVRDELEKAIAGGA

SEQ ID NO: 3371 - protein, 23 aa, Artificial Sequence
  Synthetic
ACYSASTCCSKACNLTTKRCVLS

SEQ ID NO: 3372 - protein, 40 aa, Artificial Sequence
  Synthetic
ACELYQGLCRNACQKYEIQYLSCPKTRKCCLKYPRKITSF

SEQ ID NO: 3373 - protein, 19 aa, Artificial Sequence
  Synthetic
MMDEFDQYARKVQMVGRKK

SEQ ID NO: 3374 - protein, 24 aa, Artificial Sequence
  Synthetic
FMGGLIKAATKIVPAAYCAITKKC

SEQ ID NO: 3375 - protein, 36 aa, Artificial Sequence
  Synthetic
RDCAGYMRECKEKLCCSGYVCSSRWKWCVLPAPWCR

SEQ ID NO: 3376 - protein, 36 aa, Artificial Sequence
  Synthetic
RDCAGYMRECKEKLCCSGYVCSSRWKWCVLPAPWRC

SEQ ID NO: 3377 - protein, 17 aa, Artificial Sequence
  Synthetic
CGGRGRKCFGQCLCGYD

SEQ ID NO: 3378 - protein, 24 aa, Artificial Sequence
  Synthetic
YKSGARIGRNCFCLQKGVIYKRED

SEQ ID NO: 3379 - protein, 33 aa, Artificial Sequence
  Synthetic
KCCAGGCRSGKCINGKCQCYGRSDLNEEFENYQ

SEQ ID NO: 3380 - protein, 29 aa, Artificial Sequence
  Synthetic
KVFQAVRYFIHMLENGYRLWLSSIGTGMG

SEQ ID NO: 3381 - protein, 27 aa, Artificial Sequence
  Synthetic
SARKLLQDIMSRQQGERNQEQGARVRL

SEQ ID NO: 3382 - protein, 21 aa, Artificial Sequence
  Synthetic
KNINEFLKSFIHIVQMFINPS

SEQ ID NO: 3383 - protein, 21 aa, Artificial Sequence
  Synthetic
KNINEFLKSFIHIVQMFINPS

SEQ ID NO: 3384 - protein, 20 aa, Artificial Sequence
  Synthetic
MAQYAAEMRRYINMLTRPRY

SEQ ID NO: 3385 - protein, 33 aa, Artificial Sequence; identical to SEQ ID NO: 3229
  Synthetic

SEQ ID NO: 3386 - protein, 31 aa, Artificial Sequence
  Synthetic
MEEFKNFIKRMNLRLENMFVPEIGDKCVESD

SEQ ID NO: 3387 - protein, 24 aa, Artificial Sequence
  Synthetic
GKTFAKEGGKFGLEFIACKVTNQC

SEQ ID NO: 3388 - protein, 12 aa, Artificial Sequence
  Synthetic
YGEGFRWISQYI

SEQ ID NO: 3389 - protein, 42 aa, Artificial Sequence
  Synthetic
CTDAAGTCARIVCDCDRTAAICFAAAPYNINNFMISSSTHCQ

SEQ ID NO: 3390 - protein, 22 aa, Artificial Sequence
  Synthetic
QKCAECCGGIGKCYGPQCLCNR

SEQ ID NO: 3391 - protein, 12 aa, Artificial Sequence
  Synthetic
FQEAYRRFYGPV

SEQ ID NO: 3392 - protein, 17 aa, Artificial Sequence
  Synthetic
VDNIRSILDYISRLLGE

SEQ ID NO: 3393 - protein, 17 aa, Artificial Sequence
  Synthetic
VDNIRSILDYISRLLGE

SEQ ID NO: 3394 - protein, 18 aa, Artificial Sequence
  Synthetic
CSRCCSYAGKAVQTQSGH

SEQ ID NO: 3395 - protein, 23 aa, Artificial Sequence
  Synthetic
KEVQKLAKEVLEIFQYCAYRKNQ

SEQ ID NO: 3396 - protein, 16 aa, Artificial Sequence
  Synthetic
KYLKSLFSHAFEVVKT

SEQ ID NO: 3397 - protein, 18 aa, Artificial Sequence
  Synthetic
SAGKSALNALACKIDKSC

SEQ ID NO: 3398 - protein, 16 aa, Artificial Sequence
  Synthetic
KVAKKLVSHVAQKQME

SEQ ID NO: 3399 - protein, 16 aa, Artificial Sequence
  Synthetic
GTNIWNEIRTWSNWKA

SEQ ID NO: 3400 - protein, 15 aa, Artificial Sequence
  Synthetic
DCCSNFCHTWAIMCL

SEQ ID NO: 3401 - protein, 19 aa, Artificial Sequence
  Synthetic
CDFCNDVLARAKYFKDHGF

SEQ ID NO: 3402 - protein, 29 aa, Artificial Sequence
  Synthetic
KMIKTGAETLVEEAKTLAAALLEEEIMDN

SEQ ID NO: 3403 - protein, 25 aa, Artificial Sequence
  Synthetic
WLAGCPSGWHNCKAHGPNIGWCCKK

SEQ ID NO: 3404 - protein, 25 aa, Artificial Sequence
  Synthetic
WLAGCPSGWHNCKAHGPNIGWCCKK

SEQ ID NO: 3405 - protein, 24 aa, Artificial Sequence
  Synthetic
DNISRVIRQWDTIVQESSGNAPRL

SEQ ID NO: 3406 - protein, 22 aa, Artificial Sequence
  Synthetic
TIVEFLNRWITFCQSIISASSS

SEQ ID NO: 3407 - protein, 31 aa, Artificial Sequence
  Synthetic
WQVIGQLVSTGLIGLLGPAVIILLALKKGNL

SEQ ID NO: 3408 - protein, 37 aa, Artificial Sequence
  Synthetic
VSSGFKTVRNMDGGYIAWVNKRFPVKVEHKELKYDEL

SEQ ID NO: 3409 - protein, 19 aa, Artificial Sequence
  Synthetic
EQMREIIQTAITALQSFLP

SEQ ID NO: 3410 - protein, 35 aa, Artificial Sequence
  Synthetic
RRLLEAAKEIVSLMHKDYKGMGRRKPPINNHEPSH

SEQ ID NO: 3411 - protein, 36 aa, Artificial Sequence
  Synthetic
RDCAGYMRECEEKLCCSGYVCSSRWKWCVLPAPWRR

SEQ ID NO: 3412 - protein, 24 aa, Artificial Sequence
  Synthetic
SAWDKAFDDMYKIVFSNLDGNPVH

SEQ ID NO: 3413 - protein, 12 aa, Artificial Sequence
  Synthetic
YGEGFRWLSQYI

SEQ ID NO: 3414 - protein, 12 aa, Artificial Sequence
  Synthetic
YGEGFRWLSQYI

SEQ ID NO: 3415 - protein, 20 aa, Artificial Sequence
  Synthetic
DDLDDYCNGISADCPRNPYY

SEQ ID NO: 3416 - protein, 19 aa, Artificial Sequence
  Synthetic
AEQLIEKIKNLWYTKVLGY

SEQ ID NO: 3417 - protein, 39 aa, Artificial Sequence
  Synthetic
NEVNECAKAYPNAFIRVIGFDNVRQVQCISFIVHKPEYN

SEQ ID NO: 3418 - protein, 24 aa, Artificial Sequence
  Synthetic
FNSASTLASSVLTLVLSFSFALLL

SEQ ID NO: 3419 - protein, 31 aa, Artificial Sequence
  Synthetic
ARGLLRGGWNDVDYYYGMDVWGQGTTVTVSS

SEQ ID NO: 3420 - protein, 26 aa, Artificial Sequence
  Synthetic
NAMIGVAKSAGKTALNTLACKIDKTC

SEQ ID NO: 3421 - protein, 25 aa, Artificial Sequence
  Synthetic
KQFIENGSEFAQKLLKKFSLLKPWA

SEQ ID NO: 3422 - protein, 14 aa, Artificial Sequence
  Synthetic
FEELGGSLSRLFTG

SEQ ID NO: 3423 - protein, 25 aa, Artificial Sequence
  Synthetic
LATYEKAFKQLFPTRPQCGRDKLQC

SEQ ID NO: 3424 - protein, 19 aa, Artificial Sequence
  Synthetic
AWKSCLKGILTKISSRLNA

SEQ ID NO: 3425 - protein, 29 aa, Artificial Sequence
  Synthetic
LGKAGGHCEKGVCICRKTSFKDLWDKRFG

SEQ ID NO: 3426 - protein, 29 aa, Artificial Sequence
  Synthetic
LGKAGGHCEKGVCICRKTSFKDLWDKRFG

SEQ ID NO: 3427 - protein, 20 aa, Artificial Sequence
  Synthetic
RGCSRCCSYAGEAVQTQPGH

SEQ ID NO: 3428 - protein, 20 aa, Artificial Sequence
  Synthetic
RGCSRCCSYAGEAVQTQPGH

SEQ ID NO: 3429 - protein, 29 aa, Artificial Sequence
  Synthetic
DIIKGCAATCPKVDNNDPIRCCGTDKCND

SEQ ID NO: 3430 - protein, 27 aa, Artificial Sequence
  Synthetic
RGLLSVLGSVAKHVLPHVVPVIAEHLG

SEQ ID NO: 3431 - protein, 33 aa, Artificial Sequence
  Synthetic
MTEFMNLVEEMGIEEENVQRIMDTDNCPSKIKP

SEQ ID NO: 3432 - protein, 19 aa, Artificial Sequence
  Synthetic
LHEMIQQIFNLFSTKDSSA

SEQ ID NO: 3433 - protein, 41 aa, Artificial Sequence
  Synthetic
EFMQRALQDLRKTACSLDARTETLLLQAERRALCACWPAGH

SEQ ID NO: 3434 - protein, 20 aa, Artificial Sequence
  Synthetic
NQLLELITSILNQLQGFLGR

SEQ ID NO: 3435 - protein, 42 aa, Artificial Sequence
  Synthetic
KLCSNGGTECNRHCGQNNTVGICHGQNGKLKCECVEYKRKMF

SEQ ID NO: 3436 - protein, 20 aa, Artificial Sequence
  Synthetic
RGCSRCCSYAGEAVQTQPGH

SEQ ID NO: 3437 - protein, 20 aa, Artificial Sequence
  Synthetic
RGCSRCCSYAGEAVQTQPGH

SEQ ID NO: 3438 - protein, 15 aa, Artificial Sequence
  Synthetic
SDAKKLMRDLKRMLY

SEQ ID NO: 3439 - protein, 42 aa, Artificial Sequence
  Synthetic
CYGAAGTCGRIVCDCDRTAALCFGNSEYIEGHKNIDTARFCQ

SEQ ID NO: 3440 - protein, 42 aa, Artificial Sequence
  Synthetic
CLKNAARGISGLNAGNAASIPSKCGVSVPYTISTSTDCSRVS

SEQ ID NO: 3441 - protein, 40 aa, Artificial Sequence
  Synthetic
QGVRSYLSCWGNRGICLLNRCPGRMRQIGTCLAPRVKCCR

SEQ ID NO: 3442 - protein, 21 aa, Artificial Sequence
  Synthetic
CPAGWRKCGAEWPAPCCKAIG

SEQ ID NO: 3443 - protein, 15 aa, Artificial Sequence
  Synthetic
VDKIAEKVVEQISKI

SEQ ID NO: 3444 - protein, 41 aa, Artificial Sequence
  Synthetic
EFMQRALQDLKKMAYNLDTRTETLLLRAEKRGLCDCFPAMH

SEQ ID NO: 3445 - protein, 36 aa, Artificial Sequence
  Synthetic
RDCAGYMRECKEKLCCNGYVCSSRWKWCVLPAPWRR

SEQ ID NO: 3446 - protein, 18 aa, Artificial Sequence
  Synthetic
LKCCKAMCGKVCLSPVKA

SEQ ID NO: 3447 - protein, 39 aa, Artificial Sequence
  Synthetic
GVMATATSVLAEPHRHQGPIFDTRPSPFNPNQPRPGPIY

SEQ ID NO: 3448 - protein, 22 aa, Artificial Sequence
  Synthetic
LRGCASSCPKGYTCCATDLCNW

SEQ ID NO: 3449 - protein, 13 aa, Artificial Sequence
  Synthetic
HAINAVSAIAKHS

SEQ ID NO: 3450 - protein, 29 aa, Artificial Sequence
  Synthetic
CYSGYNGVGKCFDDPKVAGPSNCGCIYNC

SEQ ID NO: 3451 - protein, 24 aa, Artificial Sequence
  Synthetic
CDECCKKAGDRAGTCEYFKCKCNP

SEQ ID NO: 3452 - protein, 16 aa, Artificial Sequence
  Synthetic
WSTLMRTVHSVIKRTP

SEQ ID NO: 3453 - protein, 24 aa, Artificial Sequence
  Synthetic
WRSAATTLFNSLNQFQHLRMNEVW

SEQ ID NO: 3454 - protein, 23 aa, Artificial Sequence
  Synthetic
QHLMRTLLSAAGAPRPAAVPIKP

SEQ ID NO: 3455 - protein, 35 aa, Artificial Sequence
  Synthetic
ILAQLWDGLKTAPSPSQETLSSHSPVSRSAGPGVA

SEQ ID NO: 3456 - protein, 25 aa, Artificial Sequence
  Synthetic
RKVEQFLDYLEEFLQTVNTEWTVES

SEQ ID NO: 3457 - protein, 16 aa, Artificial Sequence
  Synthetic
YKCCEGICGKVCLPPM

SEQ ID NO: 3458 - protein, 39 aa, Artificial Sequence
  Synthetic
GDSLHDYCTGVTPDCPRNPNKGESDELEWSAAATGSVLM

SEQ ID NO: 3459 - protein, 18 aa, Artificial Sequence
  Synthetic
SAAQSVLKGLSCKLSKDC

SEQ ID NO: 3460 - protein, 18 aa, Artificial Sequence
  Synthetic
SAAQSVLKGLSCKLSKDC

SEQ ID NO: 3461 - protein, 21 aa, Artificial Sequence
  Synthetic
LRDLRGALESLIEEEARQKKM

SEQ ID NO: 3462 - protein, 37 aa, Artificial Sequence
  Synthetic
ITKAAKCAKKIYKRHRFDAWYGWKNHCQGSLPDISSC

SEQ ID NO: 3463 - protein, 28 aa, Artificial Sequence
  Synthetic
KKAMQIMDEAVELLRYYATTKEYTNICR

SEQ ID NO: 3464 - protein, 26 aa, Artificial Sequence
  Synthetic
ASTCEAGCKQIGKSMKSCQGDTCECA

SEQ ID NO: 3465 - protein, 22 aa, Artificial Sequence
  Synthetic
TVVEFLNRWITFCQSSIATMTQ

SEQ ID NO: 3466 - protein, 22 aa, Artificial Sequence
  Synthetic
IAKGLNTFVNKVPTFGTFFAGF

SEQ ID NO: 3467 - protein, 42 aa, Artificial Sequence
  Synthetic
KAVQQVKDAFSKLQEKGIYKAMSEFDIFINYIEAYMTAKINS

SEQ ID NO: 3468 - protein, 20 aa, Artificial Sequence
  Synthetic
LFGVLAKVAAHVVPAIAEHF

SEQ ID NO: 3469 - protein, 31 aa, Artificial Sequence
  Synthetic
WQVIGQLIATGAIMLAGPAVIVLLALKKGNL

SEQ ID NO: 3470 - protein, 16 aa, Artificial Sequence
  Synthetic
KVAKTVAKQVAKKQME

SEQ ID NO: 3471 - protein, 36 aa, Artificial Sequence
  Synthetic
RDCAGYMRECKEELCCSGYVCSSRWKWCVLPAPWRR

SEQ ID NO: 3472 - protein, 16 aa, Artificial Sequence
  Synthetic
YGRCYASYYSYKKKTL

SEQ ID NO: 3473 - protein, 20 aa, Artificial Sequence
  Synthetic
FCKAIVKSGGKISLKHPGKC

SEQ ID NO: 3474 - protein, 28 aa, Artificial Sequence
  Synthetic
GRIAGNCIGTVNPKGATCTYYQRCKRAA

SEQ ID NO: 3475 - protein, 34 aa, Artificial Sequence
  Synthetic
RFGRNAWGPWSKEQLSPQAREFWSLAAPQRFGKK

SEQ ID NO: 3476 - protein, 19 aa, Artificial Sequence
  Synthetic
AEQLMEKIKNLWYTRILGY

SEQ ID NO: 3477 - protein, 29 aa, Artificial Sequence
  Synthetic
IRAAHAILGGLHLTLDWAVRGLLLLKTRL

SEQ ID NO: 3478 - protein, 29 aa, Artificial Sequence
  Synthetic
IRAAHAILGGLHLTLDWAVRGLLLLKTRL

SEQ ID NO: 3479 - protein, 33 aa, Artificial Sequence
  Synthetic
FEDCLNGFEDVVETCHGVSQGGVMTNGNGEHGG

SEQ ID NO: 3480 - protein, 19 aa, Artificial Sequence
  Synthetic
KWVEEAIAYLDMKTSTPKP

SEQ ID NO: 3481 - protein, 36 aa, Artificial Sequence; identical to SEQ ID NO: 3201
  Synthetic

SEQ ID NO: 3482 - protein, 24 aa, Artificial Sequence
  Synthetic
QVVKRLVRGCWTKSYPPKPCFVRG

SEQ ID NO: 3483 - protein, 19 aa, Artificial Sequence
  Synthetic
CDFCNDVLARAKYLKRHGF

SEQ ID NO: 3484 - protein, 11 aa, Artificial Sequence
  Synthetic
SALGGLLKKIG

SEQ ID NO: 3485 - protein, 21 aa, Artificial Sequence
  Synthetic
GMAALMEELRGLGQGIQGQQY

SEQ ID NO: 3486 - protein, 23 aa, Artificial Sequence
  Synthetic
VRNFGNACEKIVHSCKTGETFLD

SEQ ID NO: 3487 - protein, 24 aa, Artificial Sequence
  Synthetic
AVEKCVNACSTVCTKGSMNAVEIA

SEQ ID NO: 3488 - protein, 15 aa, Artificial Sequence
  Synthetic
KLAQEFVEWLKNGKS

SEQ ID NO: 3489 - protein, 12 aa, Artificial Sequence
  Synthetic
EKVQAMVGQYLN

SEQ ID NO: 3490 - protein, 42 aa, Artificial Sequence
  Synthetic
CLKNMASSFRNLNMGNAASIPSKCGVSVAFPISTSVDCSKIN

SEQ ID NO: 3491 - protein, 42 aa, Artificial Sequence; identical to SEQ ID NO: 3490
  Synthetic

SEQ ID NO: 3492 - protein, 21 aa, Artificial Sequence
  Synthetic
SIFRTLASSVGTVLSQISASG

SEQ ID NO: 3493 - protein, 14 aa, Artificial Sequence
  Synthetic
FEELGGSLSRLFTG

SEQ ID NO: 3494 - protein, 14 aa, Artificial Sequence
  Synthetic
FEELGGSLSRLFTG

SEQ ID NO: 3495 - protein, 15 aa, Artificial Sequence
  Synthetic
ARDFLRECMQHLKYA

SEQ ID NO: 3496 - protein, 26 aa, Artificial Sequence
  Synthetic
EQFLDYLEEFLRTINIEWNTEWTVES

SEQ ID NO: 3497 - protein, 33 aa, Artificial Sequence
  Synthetic
CGSDMSTYANECTLCMKIREGGHNIKIIRNGPC

SEQ ID NO: 3498 - protein, 24 aa, Artificial Sequence
  Synthetic
YKSGARIGRNCFCLQKGVIYKRED

SEQ ID NO: 3499 - protein, 15 aa, Artificial Sequence
  Synthetic
YGKCMTAFMGKICMR

SEQ ID NO: 3500 - protein, 16 aa, Artificial Sequence
  Synthetic
NYYKKLFGSGTTLVVT

SEQ ID NO: 3501 - protein, 24 aa, Artificial Sequence
  Synthetic
AVERCNEACYHFCNKEADIVTIVS

SEQ ID NO: 3502 - protein, 17 aa, Artificial Sequence
  Synthetic
LDNIRSILDYISKLLGE

SEQ ID NO: 3503 - protein, 17 aa, Artificial Sequence
  Synthetic
LDNIRSILDYISKLLGE

SEQ ID NO: 3504 - protein, 24 aa, Artificial Sequence
  Synthetic
AVDRCNEACYRFCTNEAEIVTVAS

SEQ ID NO: 3505 - protein, 21 aa, Artificial Sequence
  Synthetic
LQNITTFMERLMDLLQKLNST

SEQ ID NO: 3506 - protein, 33 aa, Artificial Sequence
  Synthetic
SSLKDYWSTLTGKFSGFWDSTFAVTPTPASEAK

SEQ ID NO: 3507 - protein, 18 aa, Artificial Sequence
  Synthetic
GVKKCCEGFCGKDCLYPK

SEQ ID NO: 3508 - protein, 38 aa, Artificial Sequence
  Synthetic
MKVVQDIIKKITDAVNPLRMTEGFLGGGGSGGSGALFG

SEQ ID NO: 3509 - protein, 31 aa, Artificial Sequence
  Synthetic
QLFKLAKQFCERVNQHPEEPSSPNIATGNGL

SEQ ID NO: 3510 - protein, 25 aa, Artificial Sequence
  Synthetic
GLFSVLGAVAKHVLPHVVPVIAEKL

SEQ ID NO: 3511 - protein, 24 aa, Artificial Sequence
  Synthetic
GLFSVLGAVAKHVLPHVVPVIAEK

SEQ ID NO: 3512 - protein, 24 aa, Artificial Sequence
  Synthetic
GLFSVLGAVAKHVLPHVVPVIAEK

SEQ ID NO: 3513 - protein, 29 aa, Artificial Sequence
  Synthetic
EEANYAVDRCNDACHRFCTKEAETVTVVS

SEQ ID NO: 3514 - protein, 18 aa, Artificial Sequence
  Synthetic
YVNRMMNYLVSGCTRYPA

SEQ ID NO: 3515 - protein, 36 aa, Artificial Sequence
  Synthetic
RDCAGYMRECKGKLCCSGYVCSSRWKWCVLPAPWRR

SEQ ID NO: 3516 - protein, 37 aa, Artificial Sequence
  Synthetic
KKAVGGLGKLGKDAVEDLESVGKGAVHDVKDVLDSVL

SEQ ID NO: 3517 - protein, 40 aa, Artificial Sequence
  Synthetic
NNIMRTIIEFLSFLHLKEAGALDRLLDLPAAASSEDIERS

SEQ ID NO: 3518 - protein, 22 aa, Artificial Sequence
  Synthetic
TVVDFLRRWIAFCQSIISTSPQ

SEQ ID NO: 3519 - protein, 24 aa, Artificial Sequence
  Synthetic
IYGGCGGNANKFKTIDECHRTCVG

SEQ ID NO: 3520 - protein, 14 aa, Artificial Sequence
  Synthetic
KLLDTLLQNLYDFA

SEQ ID NO: 3521 - protein, 14 aa, Artificial Sequence
  Synthetic
WNSCMNQIVSGISG

SEQ ID NO: 3522 - protein, 36 aa, Artificial Sequence
  Synthetic
GKALNVAKDFVAEKIGATPAEAGQIPFDEFMNVLYS

SEQ ID NO: 3523 - protein, 22 aa, Artificial Sequence
  Synthetic
VSSFLEHVKRCVRHRNFHGTKK

SEQ ID NO: 3524 - protein, 34 aa, Artificial Sequence
  Synthetic
RFGRSAWGSWSKEQLNPQARQFWSLAAPQRFGKK

SEQ ID NO: 3525 - protein, 32 aa, Artificial Sequence
  Synthetic
EALEKFDKALKALPMHIRLAFNPTQLEGQCHV

SEQ ID NO: 3526 - protein, 16 aa, Artificial Sequence
  Synthetic
ALKHFTSLAKTWETAN

SEQ ID NO: 3527 - protein, 20 aa, Artificial Sequence
  Synthetic
AVEFLNKWITFCQSIYSTLT

SEQ ID NO: 3528 - protein, 38 aa, Artificial Sequence
  Synthetic
DKVREFFKRIKESDIPAKTRNWFSETLQKVKEKLRIES

SEQ ID NO: 3529 - protein, 16 aa, Artificial Sequence
  Synthetic
MVYTIDDLIDKLTTLG

SEQ ID NO: 3530 - protein, 20 aa, Artificial Sequence
  Synthetic
LAEQLVEKIKNLWYTKVLGY

SEQ ID NO: 3531 - protein, 30 aa, Artificial Sequence
  Synthetic
TLVGQLISLFAVVAAGPLVIVFLSARRGAL

SEQ ID NO: 3532 - protein, 37 aa, Artificial Sequence
  Synthetic
QCLSPMNHLCHKDADCSGKKRCCPSACGRDCRDPARG

SEQ ID NO: 3533 - protein, 25 aa, Artificial Sequence
  Synthetic
EVLALAKEAFTKSKDSGKLYQVIPN

SEQ ID NO: 3534 - protein, 23 aa, Artificial Sequence
  Synthetic
GTWHACCNGWQEGRGIRSVSISQ

SEQ ID NO: 3535 - protein, 31 aa, Artificial Sequence
  Synthetic
WQVLGQLIATGTIMLAGPAVIVLLALKKGNL

SEQ ID NO: 3536 - protein, 33 aa, Artificial Sequence
  Synthetic
VCHNMSTLLREVVEVEDITALIHLGSVMFEMDL

SEQ ID NO: 3537 - protein, 24 aa, Artificial Sequence
  Synthetic
VTEVLHQVEEVLKTDDNTYGGLLL

SEQ ID NO: 3538 - protein, 28 aa, Artificial Sequence
  Synthetic
LMSTLKGAATNVAVTLLNKLQCKLTGTC

SEQ ID NO: 3539 - protein, 25 aa, Artificial Sequence
  Synthetic
IDKAFDYIFEVVDYCVDYKYGLLLC

SEQ ID NO: 3540 - protein, 11 aa, Artificial Sequence
  Synthetic
CTRLYAHIPSC

SEQ ID NO: 3541 - protein, 17 aa, Artificial Sequence
  Synthetic
LKKLNQIVQKFHQLLQG

SEQ ID NO: 3542 - protein, 38 aa, Artificial Sequence
  Synthetic
RGCGGLMDGCDGKSTFCCSGFNCSPTWKWCVYARPGRR

SEQ ID NO: 3543 - protein, 38 aa, Artificial Sequence; identical to SEQ ID NO: 3542
  Synthetic

SEQ ID NO: 3544 - protein, 35 aa, Artificial Sequence
  Synthetic
QGMGKMERLLASYRGALEPSTPLGDLSGSLGHPVE

SEQ ID NO: 3545 - protein, 42 aa, Artificial Sequence
  Synthetic
CLKNLAGSVSGVNPGNAESLPGKCGVNVPYKISTSTNCATVK

SEQ ID NO: 3546 - protein, 22 aa, Artificial Sequence
  Synthetic
TNLMDFLSRLMSPEEKPAPAAK

SEQ ID NO: 3547 - protein, 31 aa, Artificial Sequence
  Synthetic
NKGMNEFKKILRTLAMPYTVIEVRTRDMCHV

SEQ ID NO: 3548 - protein, 31 aa, Artificial Sequence
  Synthetic
ASFLDNAKRYLQVLESKRNCCRRQICCGRTK

SEQ ID NO: 3549 - protein, 26 aa, Artificial Sequence
  Synthetic
IYKCVNHVCDSISKVTTDSKEYKNFP

SEQ ID NO: 3550 - protein, 18 aa, Artificial Sequence
  Synthetic
GAGQSVLNTLSCKLSKTC

SEQ ID NO: 3551 - protein, 18 aa, Artificial Sequence
  Synthetic
GAGQSVLNTLSCKLSKTC

SEQ ID NO: 3552 - protein, 24 aa, Artificial Sequence
  Synthetic
YKSGAQIGRNCFCLQKGVIYKREN

SEQ ID NO: 3553 - protein, 24 aa, Artificial Sequence
  Synthetic
YKSGAQIGRNCFCLQKGVIYKREN

SEQ ID NO: 3554 - protein, 18 aa, Artificial Sequence
  Synthetic
LKKYLEALDNFLNFKNKP

SEQ ID NO: 3555 - protein, 32 aa, Artificial Sequence; identical to SEQ ID NO: 3525
  Synthetic

SEQ ID NO: 3556 - protein, 24 aa, Artificial Sequence
  Synthetic
AVEKCATACSSFCTKGSTTKAETA

SEQ ID NO: 3557 - protein, 17 aa, Artificial Sequence
  Synthetic
LLDDVGNILNEVLNLLN

SEQ ID NO: 3558 - protein, 27 aa, Artificial Sequence
  Synthetic
DLQHAWNDAFDNLYYIVFSNLDGHPVA

SEQ ID NO: 3559 - protein, 38 aa, Artificial Sequence
  Synthetic
RGCGGLMAGCGGKSTFCCSGYNCSPTWKWCVYARPGRR

SEQ ID NO: 3560 - protein, 24 aa, Artificial Sequence
  Synthetic
LYGGCGGNANNFKTIKECESTCAA

SEQ ID NO: 3561 - protein, 41 aa, Artificial Sequence
  Synthetic
GLWKSAIGKLFSFGGLGVWTLVDVVLIAVGYIKPYDGSMYI

SEQ ID NO: 3562 - protein, 32 aa, Artificial Sequence
  Synthetic
REAEQAWKEMQEALREDHIKTKPEGSQLNHDI

SEQ ID NO: 3563 - protein, 14 aa, Artificial Sequence
  Synthetic
CDRIGGNFCTCVPN

SEQ ID NO: 3564 - protein, 24 aa, Artificial Sequence
  Synthetic
SLVEIINNAMYDVIYDYVNRTYVT

SEQ ID NO: 3565 - protein, 42 aa, Artificial Sequence
  Synthetic
CHRACGTCCARCNCVAPGTSGNYDKCPCYGSLTTHGGRRKCP

SEQ ID NO: 3566 - protein, 22 aa, Artificial Sequence
  Synthetic
TVVEFLSRWITFCQSAISTMTQ

SEQ ID NO: 3567 - protein, 22 aa, Artificial Sequence
  Synthetic
TVVEFLSRWITFCQSAISTMTQ

SEQ ID NO: 3568 - protein, 15 aa, Artificial Sequence
  Synthetic
VEDFVNSAQEIVETF

SEQ ID NO: 3569 - protein, 16 aa, Artificial Sequence
  Synthetic
KVAKKLVSHVAQKQLE

SEQ ID NO: 3570 - protein, 31 aa, Artificial Sequence
  Synthetic
DILDKVENAIHNAAQVGIGFAKPFEKLINPK

SEQ ID NO: 3571 - protein, 31 aa, Artificial Sequence; identical to SEQ ID NO: 3570
  Synthetic

SEQ ID NO: 3572 - protein, 12 aa, Artificial Sequence
  Synthetic
GLPKVMNDAGRR

SEQ ID NO: 3573 - protein, 34 aa, Artificial Sequence
  Synthetic
NFNEALKNGGTTLSKKTVLLLVIPFLVAAWSLHP

SEQ ID NO: 3574 - protein, 21 aa, Artificial Sequence
  Synthetic
ATLANEVKTMAEALVEEDMME

SEQ ID NO: 3575 - protein, 27 aa, Artificial Sequence
  Synthetic
HAFEFMQRALQDLKKTAYNLDTRVRKL

SEQ ID NO: 3576 - protein, 22 aa, Artificial Sequence
  Synthetic
QKMLTILHKILEKMVDKNYPKK

SEQ ID NO: 3577 - protein, 25 aa, Artificial Sequence
  Synthetic
WLAGCPSGWHNCKAHGPTIGWCCKK

SEQ ID NO: 3578 - protein, 33 aa, Artificial Sequence
  Synthetic
KSLKGYWSKFTDKFTGLWESGPEDQLTTPTLEP

SEQ ID NO: 3579 - protein, 26 aa, Artificial Sequence
  Synthetic
RLVDEARKLFDSMPYRSVVTWNALIA

SEQ ID NO: 3580 - protein, 26 aa, Artificial Sequence
  Synthetic
FTEALKKVKTLLNDIRRMMSSDEFED

SEQ ID NO: 3581 - protein, 20 aa, Artificial Sequence
  Synthetic
FCKAVMKSGGKINLKHRGKC

SEQ ID NO: 3582 - protein, 35 aa, Artificial Sequence
  Synthetic
VDSFQEIAKEIHHLAEPQHSESAFHQPCSPLSDLR

SEQ ID NO: 3583 - protein, 24 aa, Artificial Sequence
  Synthetic
IYGGCGGNANKFKTIEECHRTCVG

SEQ ID NO: 3584 - protein, 20 aa, Artificial Sequence
  Synthetic
LAEQLMEKIKNLWYTRVLGY

SEQ ID NO: 3585 - protein, 20 aa, Artificial Sequence
  Synthetic
LAEQLMEKIKNLWYTRVLGY

SEQ ID NO: 3586 - protein, 20 aa, Artificial Sequence
  Synthetic
LAEQLMEKIKNLWYTRVLGY

SEQ ID NO: 3587 - protein, 21 aa, Artificial Sequence
  Synthetic
KNIKEFLQSFVHIVQMFINPS

SEQ ID NO: 3588 - protein, 29 aa, Artificial Sequence
  Synthetic
EDCEQWWEDCQEALTCKVNWHKGWNWTSG

SEQ ID NO: 3589 - protein, 17 aa, Artificial Sequence
  Synthetic
MEECVSTCTNMVYDKRS

SEQ ID NO: 3590 - protein, 20 aa, Artificial Sequence
  Synthetic
LAEQLMEKIKNLWYTKVLGY

SEQ ID NO: 3591 - protein, 20 aa, Artificial Sequence
  Synthetic
LAEQLMEKIKNLWYTKVLGY

SEQ ID NO: 3592 - protein, 20 aa, Artificial Sequence
  Synthetic
LAEQLMEKIKNLWYTKVLGY

SEQ ID NO: 3593 - protein, 20 aa, Artificial Sequence
  Synthetic
LAEQLMEKIKNLWYTKVLGY

SEQ ID NO: 3594 - protein, 20 aa, Artificial Sequence
  Synthetic
LAEQLMEKIKNLWYTKVLGY

SEQ ID NO: 3595 - protein, 40 aa, Artificial Sequence
  Synthetic
LGGIFGIGGGAVFKQIQRAQILPSKCNMGVDCRFPSGYYW

SEQ ID NO: 3596 - protein, 12 aa, Artificial Sequence
  Synthetic
GLPKVMNDAGRR

SEQ ID NO: 3597 - protein, 24 aa, Artificial Sequence
  Synthetic
AVKKCIKTCSNLCTKGSVTAFQTA

SEQ ID NO: 3598 - protein, 21 aa, Artificial Sequence
  Synthetic
GWEKCTAVYTAVASCCRKKKG

SEQ ID NO: 3599 - protein, 21 aa, Artificial Sequence
  Synthetic
DNFGAQLQNLLKKKMILEMIN

SEQ ID NO: 3600 - protein, 12 aa, Artificial Sequence
  Synthetic
GLPKLLNDAGRK

SEQ ID NO: 3601 - protein, 12 aa, Artificial Sequence
  Synthetic
VLNSLDNLVSGL

SEQ ID NO: 3602 - protein, 42 aa, Artificial Sequence
  Synthetic
CIKSAAAGITGINFGLASGLPGKCGVNIPYKISPSTDCNSVK

SEQ ID NO: 3603 - protein, 42 aa, Artificial Sequence; identical to SEQ ID NO: 3602
  Synthetic

SEQ ID NO: 3604 - protein, 22 aa, Artificial Sequence
  Synthetic
WYSFLEELHSAFQQIAGEAESK

SEQ ID NO: 3605 - protein, 40 aa, Artificial Sequence
  Synthetic
KWVKAAIKTVDGRASTRKNMAETVPTGAQRSTSTAITLTG

SEQ ID NO: 3606 - protein, 13 aa, Artificial Sequence
  Synthetic
KSLREMAAAAFGR

SEQ ID NO: 3607 - protein, 13 aa, Artificial Sequence
  Synthetic
RALEKLASSFRCE

SEQ ID NO: 3608 - protein, 20 aa, Artificial Sequence
  Synthetic
AVYSSGFHKVFAEGTKLIVI

SEQ ID NO: 3609 - protein, 21 aa, Artificial Sequence
  Synthetic
NAVEFLNKWITFCQSIYSTMT

SEQ ID NO: 3610 - protein, 21 aa, Artificial Sequence
  Synthetic
NAVEFLNKWITFCQSIYSTMT

SEQ ID NO: 3611 - protein, 15 aa, Artificial Sequence
  Synthetic
VTRAPHVLNDLLLKF

SEQ ID NO: 3612 - protein, 16 aa, Artificial Sequence
  Synthetic
KVAKKLVSHVAQKQLE

SEQ ID NO: 3613 - protein, 31 aa, Artificial Sequence
  Synthetic
KQIMQAISEMMNECPDRDYQGWVDFGRRSAE

SEQ ID NO: 3614 - protein, 18 aa, Artificial Sequence
  Synthetic
RDAGKLLRSLKKLKLTTH

SEQ ID NO: 3615 - protein, 41 aa, Artificial Sequence
  Synthetic
DYYGDGAARLGYFPSSIVREDQTLKPAKTDVKTDIWDFYCQ

SEQ ID NO: 3616 - protein, 32 aa, Artificial Sequence
  Synthetic
VSQFCATLSELKCWINNICFWSTADKKCKPLH

SEQ ID NO: 3617 - protein, 21 aa, Artificial Sequence
  Synthetic
LLGQALTSLTTVDRTGNGAFW

SEQ ID NO: 3618 - protein, 21 aa, Artificial Sequence
  Synthetic
LLGQALTSLTTVDRTGNGAFW

SEQ ID NO: 3619 - protein, 21 aa, Artificial Sequence
  Synthetic
LLGQALTSLTTVDRTGNGAFW

SEQ ID NO: 3620 - protein, 21 aa, Artificial Sequence
  Synthetic
LLGQALTSLTTVDRTGNGAFW

SEQ ID NO: 3621 - protein, 20 aa, Artificial Sequence
  Synthetic
LAEQLMEKIRNLWYTKVLGY

SEQ ID NO: 3622 - protein, 24 aa, Artificial Sequence
  Synthetic
LKKGVQIARQCFCLEKDVVYKKHI

SEQ ID NO: 3623 - protein, 24 aa, Artificial Sequence
  Synthetic
LKKGVQIARQCFCLEKDVVYKKHI

SEQ ID NO: 3624 - protein, 20 aa, Artificial Sequence
  Synthetic
LLDFVTGVGKDIFAQLIKQI

SEQ ID NO: 3625 - protein, 20 aa, Artificial Sequence
  Synthetic
LAEQLMEKIKNLWYTKVLGY

SEQ ID NO: 3626 - protein, 20 aa, Artificial Sequence
  Synthetic
LAEQLMEKIKNLWYTKVLGY

SEQ ID NO: 3627 - protein, 20 aa, Artificial Sequence
  Synthetic
LAEQLMEKIKNLWYTKVLGY

SEQ ID NO: 3628 - protein, 34 aa, Artificial Sequence
  Synthetic
IHDLTTFLDTLIKSCHDPLPTWETISNETINWEK

SEQ ID NO: 3629 - protein, 35 aa, Artificial Sequence
  Synthetic
RLCRHFVHELKQALTSEMAAKHHQELDKPPLYDEE

SEQ ID NO: 3630 - protein, 11 aa, Artificial Sequence
  Synthetic
EVCDGFCRLWE

SEQ ID NO: 3631 - protein, 28 aa, Artificial Sequence
  Synthetic
VVTLMDDVMDALTRLIKKTEEDLKKMNR

SEQ ID NO: 3632 - protein, 23 aa, Artificial Sequence
  Synthetic
LAHRCSKAIDDAEELVKVMAEKQ

SEQ ID NO: 3633 - protein, 23 aa, Artificial Sequence
  Synthetic
LAHRCSKAIDDAEELVKVMAEKQ

SEQ ID NO: 3634 - protein, 41 aa, Artificial Sequence
  Synthetic
ISQGNGGLSKFNQNGLEMKNLSFVKLIGVSFIAFISFILLI

SEQ ID NO: 3635 - protein, 41 aa, Artificial Sequence; identical to SEQ ID NO: 3634
  Synthetic

SEQ ID NO: 3636 - protein, 35 aa, Artificial Sequence
  Synthetic
RLCRHFVHELKQALTSEMAAKHHQDLDKPPLYDEE

SEQ ID NO: 3637 - protein, 17 aa, Artificial Sequence
  Synthetic
KRAADALTKAATAVESH

SEQ ID NO: 3638 - protein, 27 aa, Artificial Sequence
  Synthetic
AENLVESFQEIANEMEKFGEAERSECS

SEQ ID NO: 3639 - protein, 22 aa, Artificial Sequence
  Synthetic
DNVAAAWNKALDNTFAIVVPRL

SEQ ID NO: 3640 - protein, 22 aa, Artificial Sequence
  Synthetic
DNVAAAWNKALDNTFAIVVPRL

SEQ ID NO: 3641 - protein, 21 aa, Artificial Sequence
  Synthetic
IKDVEEVVSDIIDKVTDAEKN

SEQ ID NO: 3642 - protein, 20 aa, Artificial Sequence
  Synthetic
LAEQLMEKIKNLWYTRVLGY

SEQ ID NO: 3643 - protein, 20 aa, Artificial Sequence
  Synthetic
LAEQLMEKIKNLWYTRVLGY

SEQ ID NO: 3644 - protein, 20 aa, Artificial Sequence
  Synthetic
LAEQLMEKIKNLWYTRVLGY

SEQ ID NO: 3645 - protein, 20 aa, Artificial Sequence
  Synthetic
LAEQLMEKIKNLWYTRVLGY

SEQ ID NO: 3646 - protein, 20 aa, Artificial Sequence
  Synthetic
LAEQLMEKIKNLWYTRVLGY

SEQ ID NO: 3647 - protein, 16 aa, Artificial Sequence
  Synthetic
IGECVKDVLYNCHTIL

SEQ ID NO: 3648 - protein, 15 aa, Artificial Sequence
  Synthetic
QFFDAYKTYCKNSRI

SEQ ID NO: 3649 - protein, 17 aa, Artificial Sequence
  Synthetic
WDHAVQRVDEMLDELMH

SEQ ID NO: 3650 - protein, 20 aa, Artificial Sequence
  Synthetic
LAEQLMEKIKNLWYTKVLGY

SEQ ID NO: 3651 - protein, 20 aa, Artificial Sequence
  Synthetic
LAEQLMEKIKNLWYTKVLGY

SEQ ID NO: 3652 - protein, 24 aa, Artificial Sequence
  Synthetic
YKSGAQIGRNCFCLQKGVIYKREN

SEQ ID NO: 3653 - protein, 30 aa, Artificial Sequence
  Synthetic
ILDKMENAIHKAAQAGIGLAKPIENMILPK

SEQ ID NO: 3654 - protein, 26 aa, Artificial Sequence
  Synthetic
NHAVDRCNEACYRFCTNEAEIVTVAS

SEQ ID NO: 3655 - protein, 37 aa, Artificial Sequence
  Synthetic
FKGARDCGGQGKGCYTQPCCPGLRCRGGGTGGGVCQP

SEQ ID NO: 3656 - protein, 24 aa, Artificial Sequence
  Synthetic
FLRELISNASDACDKKRIGLENEK

SEQ ID NO: 3657 - protein, 30 aa, Artificial Sequence
  Synthetic
GKEGMGAWPTWSRYCQYSDTLARWLDGCKL

SEQ ID NO: 3658 - protein, 42 aa, Artificial Sequence
  Synthetic
CLKNLAGSISGVNPNNAAGLPGKCGVNVPYKISTSTNCATVK

SEQ ID NO: 3659 - protein, 39 aa, Artificial Sequence
  Synthetic
RLIDAMRNFGDTRSCGRRGKPCPCCRGFRCTGSFCRKWQ

SEQ ID NO: 3660 - protein, 29 aa, Artificial Sequence
  Synthetic
SSLKDYWSSFKGKFTDFWESATSPTQSPP

SEQ ID NO: 3661 - protein, 13 aa, Artificial Sequence
  Synthetic
AGPVSKLVSGIGL

SEQ ID NO: 3662 - protein, 17 aa, Artificial Sequence
  Synthetic
VDNIRSILDYISRLLGE

SEQ ID NO: 3663 - protein, 17 aa, Artificial Sequence
  Synthetic
VDNIRSILDYISRLLGE

SEQ ID NO: 3664 - protein, 27 aa, Artificial Sequence
  Synthetic
ADQAANEWGRSGKDPNHFRPAGLPSKY

SEQ ID NO: 3665 - protein, 39 aa, Artificial Sequence
  Synthetic
CVKKWEGGGRRVTQYCSHACAIPASYEFVHCCQTDKCNG

SEQ ID NO: 3666 - protein, 14 aa, Artificial Sequence
  Synthetic
LKEFAGGLVTGVQS

SEQ ID NO: 3667 - protein, 35 aa, Artificial Sequence
  Synthetic
IIENLLSIFKEWVSKKMFHYPPQDLVQVYRRISFN

SEQ ID NO: 3668 - protein, 32 aa, Artificial Sequence
  Synthetic
TTAFSSVTHICRDVNYGWLIRYMHANGASMFF

SEQ ID NO: 3669 - protein, 32 aa, Artificial Sequence; identical to SEQ ID NO: 3668
  Synthetic

SEQ ID NO: 3670 - protein, 32 aa, Artificial Sequence; identical to SEQ ID NO: 3668
  Synthetic

SEQ ID NO: 3671 - protein, 24 aa, Artificial Sequence
  Synthetic
FTYFFDRAVERIQDIISSYTMIPL

SEQ ID NO: 3672 - protein, 34 aa, Artificial Sequence
  Synthetic
KRFLSTLLNVASKVVPTLFCKITKKMLKLRLEII

SEQ ID NO: 3673 - protein, 21 aa, Artificial Sequence
  Synthetic
LGKAWDTAFDKMYSIVFTKLH

SEQ ID NO: 3674 - protein, 42 aa, Artificial Sequence
  Synthetic
CLKNVAGSISGLNAGNAASIPSKCGVSIPYTISPSIDCSSVN

SEQ ID NO: 3675 - protein, 42 aa, Artificial Sequence; identical to SEQ ID NO: 3674
  Synthetic

SEQ ID NO: 3676 - protein, 42 aa, Artificial Sequence; identical to SEQ ID NO: 3674
  Synthetic

SEQ ID NO: 3677 - protein, 24 aa, Artificial Sequence
  Synthetic
YKSGAQIGRNCFCLQKGVIYKREN

SEQ ID NO: 3678 - protein, 24 aa, Artificial Sequence
  Synthetic
YKSGAQIGRNCFCLQKGVIYKREN

SEQ ID NO: 3679 - protein, 24 aa, Artificial Sequence
  Synthetic
YKSGAQIGRNCFCLQKGVIYKREN

SEQ ID NO: 3680 - protein, 24 aa, Artificial Sequence
  Synthetic
YKSGAQIGRNCFCLQKGVIYKREN

SEQ ID NO: 3681 - protein, 24 aa, Artificial Sequence
  Synthetic
YKSGAQIGRNCFCLQKGVIYKREN

SEQ ID NO: 3682 - protein, 24 aa, Artificial Sequence
  Synthetic
YKSGAQIGRNCFCLQKGVIYKREN

SEQ ID NO: 3683 - protein, 12 aa, Artificial Sequence
  Synthetic
FQEAYRRFYGPV

SEQ ID NO: 3684 - protein, 12 aa, Artificial Sequence
  Synthetic
FQEAYRRFYGPV

SEQ ID NO: 3685 - protein, 12 aa, Artificial Sequence
  Synthetic
FQEAYRRFYGPV

SEQ ID NO: 3686 - protein, 23 aa, Artificial Sequence
  Synthetic
CSRCCSYAGQAVQTQQQSTEPGH

SEQ ID NO: 3687 - protein, 36 aa, Artificial Sequence
  Synthetic
KSITKCMEKAPEELCAYSFRLVMCAFKAGHPVIDSE

SEQ ID NO: 3688 - protein, 38 aa, Artificial Sequence
  Synthetic
TEWCRLFEGFCHDKNCPPPTSHVGSCHPEKRSCCKDRR

SEQ ID NO: 3689 - protein, 32 aa, Artificial Sequence
  Synthetic
LGKRGLNDLSDLDELFDGEISKADLDFLREIM

SEQ ID NO: 3690 - protein, 19 aa, Artificial Sequence
  Synthetic
GWHKCIATYTAVASCCKKD

SEQ ID NO: 3691 - protein, 31 aa, Artificial Sequence
  Synthetic
GMKTVRGCADTCANPGENEKVTYCSTDNCNS

SEQ ID NO: 3692 - protein, 42 aa, Artificial Sequence
  Synthetic
ITQAVACAKRVVSDPQGIRAWVAWRSHCQNQDLTSYIQGCGV

SEQ ID NO: 3693 - protein, 23 aa, Artificial Sequence
  Synthetic
GQALGKFLQDVLWEEADEVLADE

SEQ ID NO: 3694 - protein, 27 aa, Artificial Sequence
  Synthetic
LTTVLDQYSNYKPMGWKCHCNGHFYNP

SEQ ID NO: 3695 - protein, 18 aa, Artificial Sequence
  Synthetic
LRTVTELLKKVVDAAKKD

SEQ ID NO: 3696 - protein, 29 aa, Artificial Sequence
  Synthetic
ECDRIGAQCFADKRSTFNRSLISYTKDKC

SEQ ID NO: 3697 - protein, 31 aa, Artificial Sequence
  Synthetic
DKCTTFCRSLPNKYDFGVCDKIYACCCHINV

SEQ ID NO: 3698 - protein, 40 aa, Artificial Sequence
  Synthetic
SYVGDCGSNGGSCVSSYCPYGNRLNYFCPLGRTCCRHAYV

SEQ ID NO: 3699 - protein, 17 aa, Artificial Sequence
  Synthetic
EEVDEILRKAEEDREDM

SEQ ID NO: 3700 - protein, 24 aa, Artificial Sequence
  Synthetic
AVEKCANVCSTVCTKGSMNAVEIA

SEQ ID NO: 3701 - protein, 18 aa, Artificial Sequence
  Synthetic
GIYNDCCNACDPAKKTCT

SEQ ID NO: 3702 - protein, 24 aa, Artificial Sequence
  Synthetic
CDECCKKAGDRAGTCEYFKCKCNP

SEQ ID NO: 3703 - protein, 41 aa, Artificial Sequence
  Synthetic
NTLARNCYNACRFTGGSQPTCGILCDCIHVTTTTCPSSHPS

SEQ ID NO: 3704 - protein, 26 aa, Artificial Sequence
  Synthetic
VDECQQVLHNLVSACPQASIFSRLQE

SEQ ID NO: 3705 - protein, 33 aa, Artificial Sequence
  Synthetic
AAKDGGGKIKNYEAVVVEKLWLHSKSLESFKAL

SEQ ID NO: 3706 - protein, 34 aa, Artificial Sequence
  Synthetic
DCAKLIRSLIEIADQLDDDLDATPEELCKFVYFC

SEQ ID NO: 3707 - protein, 14 aa, Artificial Sequence
  Synthetic
IFRNLPDLVETIMQ

SEQ ID NO: 3708 - protein, 23 aa, Artificial Sequence
  Synthetic
SQFEDFVKDLERLVQLINASGDK

SEQ ID NO: 3709 - protein, 40 aa, Artificial Sequence
  Synthetic
DVLEEFGKTLEDNVREFINLITQSELPAKTRDWFSEIFGK

SEQ ID NO: 3710 - protein, 17 aa, Artificial Sequence
  Synthetic
LDNIRSILDYISKLLGE

SEQ ID NO: 3711 - protein, 24 aa, Artificial Sequence
  Synthetic
VVERCNEACYHFCNKKADIVTVVS

SEQ ID NO: 3712 - protein, 24 aa, Artificial Sequence
  Synthetic
VVERCNEACYHFCNKKADIVTVVS

SEQ ID NO: 3713 - protein, 42 aa, Artificial Sequence
  Synthetic
GMFNKAYRKALGQLSARKYLHTLMAKRVGGGSMIEDDNEPLS

SEQ ID NO: 3714 - protein, 23 aa, Artificial Sequence
  Synthetic
EEIKRVVEKMFKKFRCGLSGNDC

SEQ ID NO: 3715 - protein, 24 aa, Artificial Sequence
  Synthetic
DNVAAAWTHALDNVYTAVFQIVTA

SEQ ID NO: 3716 - protein, 31 aa, Artificial Sequence
  Synthetic
DNLVDALTRLARGLKAQTSPEQLCGLLKICK

SEQ ID NO: 3717 - protein, 19 aa, Artificial Sequence
  Synthetic
NGLISLMTTMAATPVSPTT

SEQ ID NO: 3718 - protein, 21 aa, Artificial Sequence
  Synthetic
ALQKYLESILGSSTSPRPPSS

SEQ ID NO: 3719 - protein, 21 aa, Artificial Sequence
  Synthetic
ALQKYLESILGSSTSPRPPSS

SEQ ID NO: 3720 - protein, 26 aa, Artificial Sequence
  Synthetic
VLKLWNSVLKHICNLSNDIKRIIKQS

SEQ ID NO: 3721 - protein, 14 aa, Artificial Sequence
  Synthetic
GCWAKYKHLCGRKR

SEQ ID NO: 3722 - protein, 27 aa, Artificial Sequence
  Synthetic
ADQAANEWGRSGKDPNHFRPPGLPDKY

SEQ ID NO: 3723 - protein, 27 aa, Artificial Sequence
  Synthetic
ADQAANEWGRSGKDPNHFRPSGLPDKY

SEQ ID NO: 3724 - protein, 32 aa, Artificial Sequence
  Synthetic
GGDVFKQIQRAQILPSKCNMGADCKFPSGYYW

SEQ ID NO: 3725 - protein, 37 aa, Artificial Sequence
  Synthetic
RECGGLMTRCDGKTTFCCSGMNCSPTWKWCVYAPGRR

SEQ ID NO: 3726 - protein, 32 aa, Artificial Sequence
  Synthetic
VEEVWNKCVNFCTDNGARLGYCFGVACHCLYY

SEQ ID NO: 3727 - protein, 25 aa, Artificial Sequence
  Synthetic
GLLSVLGSVVKHVIPHVVPVIAEHL

SEQ ID NO: 3728 - protein, 29 aa, Artificial Sequence
  Synthetic
FHDCEDAARELQSQIQEARADLARRGLRF

SEQ ID NO: 3729 - protein, 20 aa, Artificial Sequence
  Synthetic
AVEFLNKWITFCQSIYSTLT

SEQ ID NO: 3730 - protein, 20 aa, Artificial Sequence
  Synthetic
AVEFLNKWITFCQSIYSTLT

SEQ ID NO: 3731 - protein, 37 aa, Artificial Sequence
  Synthetic
HCLSPMNHLCHKDSDCSGKKRCCHSACGRDCRDPARG

SEQ ID NO: 3732 - protein, 33 aa, Artificial Sequence
  Synthetic
EEIMEKFRRALQPLPGRVQIVPDLTRMAERCRI

SEQ ID NO: 3733 - protein, 15 aa, Artificial Sequence
  Synthetic
CGDAHHFYRGCTCTC

SEQ ID NO: 3734 - protein, 24 aa, Artificial Sequence
  Synthetic
AVERCNEACYHFCNKEADIVTIVS

SEQ ID NO: 3735 - protein, 12 aa, Artificial Sequence
  Synthetic
FQDAYRRFYGTV

SEQ ID NO: 3736 - protein, 26 aa, Artificial Sequence
  Synthetic
DLCEAACKDLGKPMDFCKDGTCKCKD

SEQ ID NO: 3737 - protein, 42 aa, Artificial Sequence
  Synthetic
ALKEAKDLIEGLPKKVKEGVSKDEAEDAKKQLEEVGAKVSIA

SEQ ID NO: 3738 - protein, 21 aa, Artificial Sequence
  Synthetic
ATEWLKNLVEIAEKQQKAAPK

SEQ ID NO: 3739 - protein, 12 aa, Artificial Sequence
  Synthetic
EAYEKYIKSIEE

SEQ ID NO: 3740 - protein, 42 aa, Artificial Sequence
  Synthetic
CLKGIARGIHNLNLNNAASIPSKCNVNVPYTISPDIDCSRIY

SEQ ID NO: 3741 - protein, 31 aa, Artificial Sequence
  Synthetic
FEQVKEMLNNLFEAADDNTGQLHLNLGNDDL

SEQ ID NO: 3742 - protein, 12 aa, Artificial Sequence
  Synthetic
FQEAYRRFYGPV

SEQ ID NO: 3743 - protein, 12 aa, Artificial Sequence
  Synthetic
FQEAYRRFYGPV

SEQ ID NO: 3744 - protein, 12 aa, Artificial Sequence
  Synthetic
FQEAYRRFYGPV

SEQ ID NO: 3745 - protein, 12 aa, Artificial Sequence
  Synthetic
FQEAYRRFYGPV

SEQ ID NO: 3746 - protein, 12 aa, Artificial Sequence
  Synthetic
FQEAYRRFYGPV

SEQ ID NO: 3747 - protein, 12 aa, Artificial Sequence
  Synthetic
FQEAYRRFYGPV

SEQ ID NO: 3748 - protein, 12 aa, Artificial Sequence
  Synthetic
FQEAYRRFYGPV

SEQ ID NO: 3749 - protein, 12 aa, Artificial Sequence
  Synthetic
FQEAYRRFYGPV

SEQ ID NO: 3750 - protein, 26 aa, Artificial Sequence
  Synthetic
KRFLSTLLNVASKVVPTLFCKITKKC

SEQ ID NO: 3751 - protein, 26 aa, Artificial Sequence
  Synthetic
KRFLSTLLNVASKVVPTLFCKITKKC

SEQ ID NO: 3752 - protein, 17 aa, Artificial Sequence
  Synthetic
ILDVITDAVNSAMNAMG

SEQ ID NO: 3753 - protein, 31 aa, Artificial Sequence
  Synthetic
STAFSSVTHICRDVNYGWLIRYMHANGASMF

SEQ ID NO: 3754 - protein, 31 aa, Artificial Sequence
  Synthetic
GMKTVRGCAKTCATPGENEKITYCSTDNCNI

SEQ ID NO: 3755 - protein, 15 aa, Artificial Sequence
  Synthetic
LKCLNGVCTKVTPRR

SEQ ID NO: 3756 - protein, 26 aa, Artificial Sequence
  Synthetic
TTAFSSVTHICRDVNYGWLIRYMHAN

SEQ ID NO: 3757 - protein, 21 aa, Artificial Sequence
  Synthetic
KNIKEFLQSFVHIVQMFINTS

SEQ ID NO: 3758 - protein, 30 aa, Artificial Sequence
  Synthetic
RGIATFMTDLVEGSKYFRVKMDIKLYECYY

SEQ ID NO: 3759 - protein, 29 aa, Artificial Sequence
  Synthetic
KVQRILDKFMESLSEKQKKEFGDLYFDKV

SEQ ID NO: 3760 - protein, 26 aa, Artificial Sequence
  Synthetic
QQIQAIMDSLSESVRREIINALSPQE

SEQ ID NO: 3761 - protein, 29 aa, Artificial Sequence
  Synthetic
ARAAAKTAADALAAAKKTAADAAAAAAAA

SEQ ID NO: 3762 - protein, 24 aa, Artificial Sequence
  Synthetic
VLNALGQAWNAVGNSISRYYCDAE

SEQ ID NO: 3763 - protein, 29 aa, Artificial Sequence
  Synthetic
SADQAARSAMNRPPGCCNNPACVKHRCGG

SEQ ID NO: 3764 - protein, 31 aa, Artificial Sequence
  Synthetic
FYGGCYGNANNFKEINECDRRCVSPDINKPG

SEQ ID NO: 3765 - protein, 18 aa, Artificial Sequence
  Synthetic
AKNAIGKCDDFKCQCLNS

SEQ ID NO: 3766 - protein, 33 aa, Artificial Sequence
  Synthetic
FSSLKDYWSTVKDKFSEFWDLDPEVRPTSAVAA

SEQ ID NO: 3767 - protein, 42 aa, Artificial Sequence
  Synthetic
CLKNAARGIRGLNVGKAASIPSKCGVSIPYTISTSTDCSRVS

SEQ ID NO: 3768 - protein, 12 aa, Artificial Sequence
  Synthetic
VAFFKAVGATIM

SEQ ID NO: 3769 - protein, 31 aa, Artificial Sequence
  Synthetic
TLEDAAKSAADKVKRSLSDDDDREKKHPKEL

SEQ ID NO: 3770 - protein, 28 aa, Artificial Sequence
  Synthetic
TNYEGGGEDVFEDGKRRVFTGPNPLHNR

SEQ ID NO: 3771 - protein, 23 aa, Artificial Sequence
  Synthetic
GNCGDGWKKCRSVNAIFNCCQRV

SEQ ID NO: 3772 - protein, 30 aa, Artificial Sequence
  Synthetic
LSSVYGNGKSILRGILRKGICCGVSFCYPC

SEQ ID NO: 3773 - protein, 21 aa, Artificial Sequence
  Synthetic
AGWEKCASYYTIIADCCRKKK

SEQ ID NO: 3774 - protein, 42 aa, Artificial Sequence
  Synthetic
KLCSNGGTKCTHHCGKNNTVGICHGQNGNLKCECVEYKRKMF

SEQ ID NO: 3775 - protein, 17 aa, Artificial Sequence
  Synthetic
TAAGHLGSVLAAKQSGW

SEQ ID NO: 3776 - protein, 27 aa, Artificial Sequence
  Synthetic
GESCCTGICKWVFFTSKFMCRRVWGKD

SEQ ID NO: 3777 - protein, 31 aa, Artificial Sequence
  Synthetic
FKKWLQTVAEAAEELKNMVEKVANGDSGKTN

SEQ ID NO: 3778 - protein, 42 aa, Artificial Sequence
  Synthetic
CLKSLATSIKGINMGKVSGVPGKCGVSVPFPISMSTDCNKVH

SEQ ID NO: 3779 - protein, 15 aa, Artificial Sequence
  Synthetic
TALRRYNQWATGHFM

SEQ ID NO: 3780 - protein, 33 aa, Artificial Sequence
  Synthetic
LGKRGLKNLDQYNDLFDGEISDADIKFLKDLMR

SEQ ID NO: 3781 - protein, 29 aa, Artificial Sequence
  Synthetic
VEDAIRKFVRWLVQKYGINIHDLIDHFKH

SEQ ID NO: 3782 - protein, 27 aa, Artificial Sequence
  Synthetic
ADQAANEWGRSGKDPNHFRPAGLPDKY

SEQ ID NO: 3783 - protein, 29 aa, Artificial Sequence
  Synthetic
EVMNKAVEKCTKACSTFCTKGSKIAVKTA

SEQ ID NO: 3784 - protein, 29 aa, Artificial Sequence
  Synthetic
ILDKFLKEFSSVFHHSKMSTSTGAWSNLV

SEQ ID NO: 3785 - protein, 24 aa, Artificial Sequence
  Synthetic
LKKGVQIARQCFCSEKDVIYKKDI

SEQ ID NO: 3786 - protein, 29 aa, Artificial Sequence
  Synthetic
SSLKDYWSTFKGKFTDFWDYTPKPEPSSS

SEQ ID NO: 3787 - protein, 32 aa, Artificial Sequence
  Synthetic
RFLKGYWSKFTDKFTGFWDSNPEDQPTPAIES

SEQ ID NO: 3788 - protein, 19 aa, Artificial Sequence
  Synthetic
VINNLAKGLDEIVSKVLGQ

SEQ ID NO: 3789 - protein, 41 aa, Artificial Sequence
  Synthetic
YKNVIERFIKNCFGLEKETNYRTWFNLSCGDDYPFVCKSPA

SEQ ID NO: 3790 - protein, 41 aa, Artificial Sequence; identical to SEQ ID NO: 3789
  Synthetic

SEQ ID NO: 3791 - protein, 31 aa, Artificial Sequence
  Synthetic
TLEDAAKSAAETVRTFSESDENRETQHQNEL

SEQ ID NO: 3792 - protein, 29 aa, Artificial Sequence
  Synthetic
KMIQTGAENLAEEAETLAAALLEEEMMDN

SEQ ID NO: 3793 - protein, 22 aa, Artificial Sequence
  Synthetic
DNVAAAWNKALDNTYAIVVPRL

SEQ ID NO: 3794 - protein, 33 aa, Artificial Sequence
  Synthetic
TAFNNIVKTFTDALTKMMPPPSSGAPSNGAPAQ

SEQ ID NO: 3795 - protein, 28 aa, Artificial Sequence
  Synthetic
NDVNHAWDDAFDKMYFVVFSALEGHPVS

SEQ ID NO: 3796 - protein, 24 aa, Artificial Sequence
  Synthetic
AVEKCANACSTVCTKGSVNAVEIA

SEQ ID NO: 3797 - protein, 24 aa, Artificial Sequence
  Synthetic
AVEKCANACSTVCTKGSVNAVEIA

SEQ ID NO: 3798 - protein, 28 aa, Artificial Sequence
  Synthetic
LLKNLLNQVTTLVNEAALNESSNVKQTQ

SEQ ID NO: 3799 - protein, 17 aa, Artificial Sequence
  Synthetic
FCQACWNSARTCGPYVG

SEQ ID NO: 3800 - protein, 22 aa, Artificial Sequence
  Synthetic
DNVAAAWNKALDNTYAIVVPRL

SEQ ID NO: 3801 - protein, 18 aa, Artificial Sequence
  Synthetic
LDRVCEECYQLFRESDVH

SEQ ID NO: 3802 - protein, 27 aa, Artificial Sequence
  Synthetic
GGGGKKCGGYGGGYGSGVIIGAERPKK

SEQ ID NO: 3803 - protein, 12 aa, Artificial Sequence
  Synthetic
GISALMNEAGRR

SEQ ID NO: 3804 - protein, 12 aa, Artificial Sequence
  Synthetic
EAYEKYIKSIEE

SEQ ID NO: 3805 - protein, 15 aa, Artificial Sequence
  Synthetic
VLYQLWEWFSSFLHQ

SEQ ID NO: 3806 - protein, 41 aa, Artificial Sequence
  Synthetic
QCLNNLLSTWDPSVRLSPVSCNCTPQPNNNILCSCPNMICP

SEQ ID NO: 3807 - protein, 42 aa, Artificial Sequence
  Synthetic
CLKSLATSIKSINMGKVSGVPGKCGVSVPFPISMSTNCNNVN

SEQ ID NO: 3808 - protein, 12 aa, Artificial Sequence
  Synthetic
FQEAYRRFYGPV

SEQ ID NO: 3809 - protein, 24 aa, Artificial Sequence
  Synthetic
LLDIVTGLLGNLIVDVLKPKTPAS

SEQ ID NO: 3810 - protein, 24 aa, Artificial Sequence
  Synthetic
LLDIVTGLLGNLIVDVLKPKTPAS

SEQ ID NO: 3811 - protein, 36 aa, Artificial Sequence
  Synthetic
TCVDSMADPVRVKRVWPLVIRTVIAGYNLYRAIKKK

SEQ ID NO: 3812 - protein, 24 aa, Artificial Sequence
  Synthetic
LKKGVQIARQCFCSEKDVIYKKDI

SEQ ID NO: 3813 - protein, 24 aa, Artificial Sequence
  Synthetic
LKKGVQIARQCFCSEKDVIYKKDI

SEQ ID NO: 3814 - protein, 41 aa, Artificial Sequence
  Synthetic
DIIDNVENAIHKAAKTGIGMVKPIENIFIPNQQKKSTEASN

SEQ ID NO: 3815 - protein, 12 aa, Artificial Sequence
  Synthetic
FYGSYSGLGSSL

SEQ ID NO: 3816 - protein, 12 aa, Artificial Sequence
  Synthetic
FYGSYSGLGSSL

SEQ ID NO: 3817 - protein, 29 aa, Artificial Sequence
  Synthetic
TTAFSSVTHICRDVNYGWIIRYMHANGAS

SEQ ID NO: 3818 - protein, 29 aa, Artificial Sequence
  Synthetic
TTAFSSVTHICRDVNYGWIIRYMHANGAS

SEQ ID NO: 3819 - protein, 29 aa, Artificial Sequence
  Synthetic
TTAFSSVTHICRDVNYGWIIRYLHANGAS

SEQ ID NO: 3820 - protein, 35 aa, Artificial Sequence
  Synthetic
IISSFKSFISTISKVSNSIILGLMTLIVFVYLILI

SEQ ID NO: 3821 - protein, 18 aa, Artificial Sequence
  Synthetic
LKKFLQFIYYCCNICLSE

SEQ ID NO: 3822 - protein, 18 aa, Artificial Sequence
  Synthetic
VSTLLTVMSTAFSGLGVL

SEQ ID NO: 3823 - protein, 12 aa, Artificial Sequence
  Synthetic
VLNSLDNLVSGL

SEQ ID NO: 3824 - protein, 35 aa, Artificial Sequence
  Synthetic
WSQAMKPLEDAADYMRSQGVSESAIKHFIAAYFNH

SEQ ID NO: 3825 - protein, 42 aa, Artificial Sequence
  Synthetic
FDEFHEAFHNFLHTHSVWNDNVDAAWHCNEKEIRKVINANLE

SEQ ID NO: 3826 - protein, 25 aa, Artificial Sequence
  Synthetic
QEANRWGRSGKDPNRYRPKGLDPKY

SEQ ID NO: 3827 - protein, 27 aa, Artificial Sequence
  Synthetic
KECWAPCKAAVGTDRGKCMGKKCRCYG

SEQ ID NO: 3828 - protein, 37 aa, Artificial Sequence
  Synthetic
RDCRALYGGCTKDEDCCKHLACRRTLPTYCAWDLTFP

SEQ ID NO: 3829 - protein, 37 aa, Artificial Sequence; identical to SEQ ID NO: 3828
  Synthetic

SEQ ID NO: 3830 - protein, 33 aa, Artificial Sequence
  Synthetic
CGSDGRTYANSCIARCNGVSIKSEGSCPTGILN

SEQ ID NO: 3831 - protein, 12 aa, Artificial Sequence
  Synthetic
FFGSYSGLGSSL

SEQ ID NO: 3832 - protein, 27 aa, Artificial Sequence
  Synthetic
EELGKIIEGFVTGAEDIISGASRITKS

SEQ ID NO: 3833 - protein, 14 aa, Artificial Sequence
  Synthetic
FEELGSKIAQLFTG

SEQ ID NO: 3834 - protein, 12 aa, Artificial Sequence
  Synthetic
EKIQAIVGQYVN

SEQ ID NO: 3835 - protein, 31 aa, Artificial Sequence
  Synthetic
REMSQIMQSARRLLNMCRVGPTECDFEMSTY

SEQ ID NO: 3836 - protein, 34 aa, Artificial Sequence
  Synthetic
LRKLETVVNEIVDEMNYLKRREAKLRDTNGKLIS

SEQ ID NO: 3837 - protein, 29 aa, Artificial Sequence
  Synthetic
DQFLSKIPAACNIKVGFPVSTNTNCETIH

SEQ ID NO: 3838 - protein, 29 aa, Artificial Sequence
  Synthetic
DQFLSKIPAACNIKVGFPVSTATNCETIH

SEQ ID NO: 3839 - protein, 33 aa, Artificial Sequence
  Synthetic
CGTDGKTYANECILCFENRKFGTSIRIQRRGLC

SEQ ID NO: 3840 - protein, 25 aa, Artificial Sequence
  Synthetic
LIGRCPSGWHNCRGSGPFIGYCCKQ

SEQ ID NO: 3841 - protein, 42 aa, Artificial Sequence
  Synthetic
CLKSAANSIKGIDTGKAAGLPGVCGVNIPYKISPSTDCSTVQ

SEQ ID NO: 3842 - protein, 16 aa, Artificial Sequence
  Synthetic
KFPELLQHVLSKAREG

SEQ ID NO: 3843 - protein, 22 aa, Artificial Sequence
  Synthetic
TVVEFLSRWITFCQSTIAAMTQ

SEQ ID NO: 3844 - protein, 17 aa, Artificial Sequence
  Synthetic
KDVNTLAEALLEADMMV

SEQ ID NO: 3845 - protein, 42 aa, Artificial Sequence
  Synthetic
ETLESLGGALEASLYSTEVVALSRLQASLQDMLWRLDLSPGC

SEQ ID NO: 3846 - protein, 25 aa, Artificial Sequence
  Synthetic
EKAEEWGRSGKDPDRFRPDGLPKKY

SEQ ID NO: 3847 - protein, 41 aa, Artificial Sequence
  Synthetic
KMFGDCWGDGDCCLHLGCKTRKLPPWTDKPYCAWDWTFGRK

SEQ ID NO: 3848 - protein, 24 aa, Artificial Sequence
  Synthetic
NMAAKCNACCGSRRGSCRGPQCIC

SEQ ID NO: 3849 - protein, 37 aa, Artificial Sequence
  Synthetic
ALERASEVLNNCLNSELHSRMIDYHIGLLKTMGSTTE

SEQ ID NO: 3850 - protein, 23 aa, Artificial Sequence
  Synthetic
LSFLKSLLGTFQKTEMQRQKSRP

SEQ ID NO: 3851 - protein, 19 aa, Artificial Sequence
  Synthetic
IDHLFENMKKALVLLKTEL

SEQ ID NO: 3852 - protein, 19 aa, Artificial Sequence
  Synthetic
IDHLFENMKKALVLLKTEL

SEQ ID NO: 3853 - protein, 17 aa, Artificial Sequence
  Synthetic
GYNAAYNRYFRQRRRAE

SEQ ID NO: 3854 - protein, 35 aa, Artificial Sequence
  Synthetic
SILDQILQNIGRSSGNIFHKEQQRTSAQRRSQGSQ

SEQ ID NO: 3855 - protein, 12 aa, Artificial Sequence
  Synthetic
FYGAYSGLGSSL

SEQ ID NO: 3856 - protein, 42 aa, Artificial Sequence
  Synthetic
ENYQKLIGRGAEDSKADQEANQWGRSGNDPNHFRPKGLPDKY

SEQ ID NO: 3857 - protein, 27 aa, Artificial Sequence
  Synthetic
HQMARKCDDCCGGKGRGKCYGPQCLCR

SEQ ID NO: 3858 - protein, 21 aa, Artificial Sequence
  Synthetic
IAKVENYLESLHLNRDKLKVC

SEQ ID NO: 3859 - protein, 42 aa, Artificial Sequence
  Synthetic
CLKSAANAIKGINYGKAAGLPGMCGVHIPYAISPSTNCNAVH

SEQ ID NO: 3860 - protein, 20 aa, Artificial Sequence
  Synthetic
SSLKSFVEKAAKELTTETTE

SEQ ID NO: 3861 - protein, 18 aa, Artificial Sequence
  Synthetic
CSRCCSYAGEAVQTQSGH

SEQ ID NO: 3862 - protein, 11 aa, Artificial Sequence
  Synthetic
LAALEKALKEY

SEQ ID NO: 3863 - protein, 15 aa, Artificial Sequence
  Synthetic
HVKQAINKMLTKISS

SEQ ID NO: 3864 - protein, 18 aa, Artificial Sequence
  Synthetic
GCLAGYMRTADGRCKPTF

SEQ ID NO: 3865 - protein, 26 aa, Artificial Sequence
  Synthetic
GALGIANSFLDEYLDLNIAKKLRRQF

SEQ ID NO: 3866 - protein, 13 aa, Artificial Sequence
  Synthetic
QYSRLGDKWARNK

SEQ ID NO: 3867 - protein, 18 aa, Artificial Sequence
  Synthetic
CSRCCSYAGEAVQTQSGH

SEQ ID NO: 3868 - protein, 24 aa, Artificial Sequence
  Synthetic
AVERCEDACDRFCTNEAQTVTVVS

SEQ ID NO: 3869 - protein, 34 aa, Artificial Sequence
  Synthetic
LKELVKKASDIIKKEESLEKKLTEHLSPGSSANG

SEQ ID NO: 3870 - protein, 35 aa, Artificial Sequence
  Synthetic
KPLHTMVNHISRFATKMTEPQPKYSTTEKQVLDML

SEQ ID NO: 3871 - protein, 26 aa, Artificial Sequence
  Synthetic
KRFLSTLLNVASNVVPTLICKITKKC

SEQ ID NO: 3872 - protein, 25 aa, Artificial Sequence
  Synthetic
WLAGCPSGWHNCKAHGPTIGWCCKQ

SEQ ID NO: 3873 - protein, 25 aa, Artificial Sequence
  Synthetic
WLAGCPSGWHNCKAHGPTIGWCCKQ

SEQ ID NO: 3874 - protein, 25 aa, Artificial Sequence
  Synthetic
WLAGCPSGWHNCKAHGPTIGWCCKQ

SEQ ID NO: 3875 - protein, 25 aa, Artificial Sequence
  Synthetic
WLAGCPSGWHNCKAHGPTIGWCCKQ

SEQ ID NO: 3876 - protein, 25 aa, Artificial Sequence
  Synthetic
WLAGCPSGWHNCKAHGPTIGWCCKK

SEQ ID NO: 3877 - protein, 14 aa, Artificial Sequence
  Synthetic
LLGTLGNLLNGLGL

SEQ ID NO: 3878 - protein, 31 aa, Artificial Sequence
  Synthetic
FAKCFHDLIKKFKKLGYVDGDNMVGASYDWR

SEQ ID NO: 3879 - protein, 35 aa, Artificial Sequence
  Synthetic
QIDTLYGAIIAGHLNPLESRPSSAIAPTSLLTPMP

SEQ ID NO: 3880 - protein, 19 aa, Artificial Sequence
  Synthetic
ELARQAMKQIQDVIDAAIE

SEQ ID NO: 3881 - protein, 19 aa, Artificial Sequence
  Synthetic
AEQMMEKIKNLWYTKVLGY

SEQ ID NO: 3882 - protein, 25 aa, Artificial Sequence
  Synthetic
WLAGCPSGWHNCKAHGPTIGWCCKK

SEQ ID NO: 3883 - protein, 17 aa, Artificial Sequence
  Synthetic
LPRLLRTYISRIYINKL

SEQ ID NO: 3884 - protein, 17 aa, Artificial Sequence
  Synthetic
LPRLLRTYISRIYINKL

SEQ ID NO: 3885 - protein, 30 aa, Artificial Sequence
  Synthetic
LRYIRGCAATCPETKPRDMVECCSTDRCNR

SEQ ID NO: 3886 - protein, 21 aa, Artificial Sequence
  Synthetic
GIVDQCCTSICSLYQLENYCN

SEQ ID NO: 3887 - protein, 21 aa, Artificial Sequence
  Synthetic
GIVDQCCTSICSLYQLENYCN

SEQ ID NO: 3888 - protein, 11 aa, Artificial Sequence
  Synthetic
SALGGLLKKIG

SEQ ID NO: 3889 - protein, 17 aa, Artificial Sequence
  Synthetic
VAKHVLASYNTAEATTN

SEQ ID NO: 3890 - protein, 20 aa, Artificial Sequence
  Synthetic
LRDLKGALESLIEEETGQKT

SEQ ID NO: 3891 - protein, 17 aa, Artificial Sequence
  Synthetic
VAQILQDFAEDIDKMKH

SEQ ID NO: 3892 - protein, 30 aa, Artificial Sequence
  Synthetic
VYTVVASFVSLFIFGFLSNDPGRRPGRKRI

SEQ ID NO: 3893 - protein, 16 aa, Artificial Sequence
  Synthetic
SNCQHFAEELYQFVQA

SEQ ID NO: 3894 - protein, 22 aa, Artificial Sequence
  Synthetic
DNVAAAWNKALDNTFAIVVPRL

SEQ ID NO: 3895 - protein, 22 aa, Artificial Sequence
  Synthetic
DNVAAAWNKALDNTFAIVVPRL

SEQ ID NO: 3896 - protein, 36 aa, Artificial Sequence
  Synthetic
ECDKAAATCFARNKTTYNKKYQYYSNKHCRGSTPRC

SEQ ID NO: 3897 - protein, 14 aa, Artificial Sequence
  Synthetic
FVYDVETVMSKLVK

SEQ ID NO: 3898 - protein, 23 aa, Artificial Sequence
  Synthetic
SRILNYMEDVLHYIGISPIYRGS

SEQ ID NO: 3899 - protein, 20 aa, Artificial Sequence
  Synthetic
VLNNLAKGLDDILNKVLGQQ

SEQ ID NO: 3900 - protein, 16 aa, Artificial Sequence
  Synthetic
KFIKPMEYVLNSVEDH

SEQ ID NO: 3901 - protein, 21 aa, Artificial Sequence
  Synthetic
LRDLRGALERLIEEEAGQKKM

SEQ ID NO: 3902 - protein, 24 aa, Artificial Sequence
  Synthetic
QAYQRYFGSGTHPQQRPAAAARRY

SEQ ID NO: 3903 - protein, 25 aa, Artificial Sequence
  Synthetic
AATIVEFLNKWIIFCQSIISKRLDN

SEQ ID NO: 3904 - protein, 21 aa, Artificial Sequence
  Synthetic
FARQFFQQWYYVMEQLVAHNH

SEQ ID NO: 3905 - protein, 21 aa, Artificial Sequence
  Synthetic
FARQFFQQWYYVMEQLVAHNH

SEQ ID NO: 3906 - protein, 42 aa, Artificial Sequence
  Synthetic
EPMREYMHHLLALEHRAEEQFLEHWLNPHCKPHCDRNIVHPV

SEQ ID NO: 3907 - protein, 22 aa, Artificial Sequence
  Synthetic
DNVAAAWNKALDNTFAIVVPRL

SEQ ID NO: 3908 - protein, 16 aa, Artificial Sequence
  Synthetic
KVGKQLASHLAKKQLE

SEQ ID NO: 3909 - protein, 32 aa, Artificial Sequence
  Synthetic
EALEKFDKALKALPMHIRLSFNPTQLEEQCHV

SEQ ID NO: 3910 - protein, 32 aa, Artificial Sequence
  Synthetic
EALEKFDKALKALPMHIRLSFNPTQLEEQCHI

SEQ ID NO: 3911 - protein, 42 aa, Artificial Sequence
  Synthetic
EPMREYMHHLLALEHRAEEQFLEHWLNPHCKPHCDRNIVQPV

SEQ ID NO: 3912 - protein, 18 aa, Artificial Sequence
  Synthetic
CSRCCSYAGEAVQTQPGH

SEQ ID NO: 3913 - protein, 12 aa, Artificial Sequence
  Synthetic
FYGSYSGLGSSL

SEQ ID NO: 3914 - protein, 12 aa, Artificial Sequence
  Synthetic
FYGSYSGLGSSL

SEQ ID NO: 3915 - protein, 12 aa, Artificial Sequence
  Synthetic
FYGSYSGLGSSL

SEQ ID NO: 3916 - protein, 12 aa, Artificial Sequence
  Synthetic
FYGSYSGLGSSL

SEQ ID NO: 3917 - protein, 12 aa, Artificial Sequence
  Synthetic
FYGSYSGLGSSL

SEQ ID NO: 3918 - protein, 12 aa, Artificial Sequence
  Synthetic
FYGSYSGLGSSL

SEQ ID NO: 3919 - protein, 12 aa, Artificial Sequence
  Synthetic
FYGSYSGLGSSL

SEQ ID NO: 3920 - protein, 12 aa, Artificial Sequence
  Synthetic
FYGSYSGLGSSL

SEQ ID NO: 3921 - protein, 12 aa, Artificial Sequence
  Synthetic
FYGSYSGLGSSL

SEQ ID NO: 3922 - protein, 12 aa, Artificial Sequence
  Synthetic
FYGSYSGLGSSL

SEQ ID NO: 3923 - protein, 12 aa, Artificial Sequence
  Synthetic
FYGSYSGLGSSL

SEQ ID NO: 3924 - protein, 12 aa, Artificial Sequence
  Synthetic
FYGSYSGLGSSL

SEQ ID NO: 3925 - protein, 12 aa, Artificial Sequence
  Synthetic
FYGSYSGLGSSL

SEQ ID NO: 3926 - protein, 12 aa, Artificial Sequence
  Synthetic
FYGSYSGLGSSL

SEQ ID NO: 3927 - protein, 12 aa, Artificial Sequence
  Synthetic
FYGSYSGLGSSL

SEQ ID NO: 3928 - protein, 12 aa, Artificial Sequence
  Synthetic
FYGSYSGLGSSL

SEQ ID NO: 3929 - protein, 12 aa, Artificial Sequence
  Synthetic
FYGSYSGLGSSL

SEQ ID NO: 3930 - protein, 12 aa, Artificial Sequence
  Synthetic
FYGSYSGLGSSL

SEQ ID NO: 3931 - protein, 12 aa, Artificial Sequence
  Synthetic
FYGSYSGLGSSL

SEQ ID NO: 3932 - protein, 12 aa, Artificial Sequence
  Synthetic
FYGSYSGLGSSL

SEQ ID NO: 3933 - protein, 12 aa, Artificial Sequence
  Synthetic
FYGSYSGLGSSL

SEQ ID NO: 3934 - protein, 12 aa, Artificial Sequence
  Synthetic
FYGSYSGLGSSL

SEQ ID NO: 3935 - protein, 12 aa, Artificial Sequence
  Synthetic
FYGSYSGLGSSL

SEQ ID NO: 3936 - protein, 12 aa, Artificial Sequence
  Synthetic
FYGSYSGLGSSL

SEQ ID NO: 3937 - protein, 12 aa, Artificial Sequence
  Synthetic
FYGSYSGLGSSL

SEQ ID NO: 3938 - protein, 12 aa, Artificial Sequence
  Synthetic
FYGSYSGLGSSL

SEQ ID NO: 3939 - protein, 12 aa, Artificial Sequence
  Synthetic
FYGSYSGLGSSL

SEQ ID NO: 3940 - protein, 12 aa, Artificial Sequence
  Synthetic
FYGSYSGLGSSL

SEQ ID NO: 3941 - protein, 12 aa, Artificial Sequence
  Synthetic
FYGSYSGLGSSL

SEQ ID NO: 3942 - protein, 12 aa, Artificial Sequence
  Synthetic
FYGSYSGLGSSL

SEQ ID NO: 3943 - protein, 12 aa, Artificial Sequence
  Synthetic
FYGSYSGLGSSL

SEQ ID NO: 3944 - protein, 12 aa, Artificial Sequence
  Synthetic
FYGSYSGLGSSL

SEQ ID NO: 3945 - protein, 12 aa, Artificial Sequence
  Synthetic
FYGSYSGLGSSL

SEQ ID NO: 3946 - protein, 12 aa, Artificial Sequence
  Synthetic
FYGSYSGLGSSL

SEQ ID NO: 3947 - protein, 12 aa, Artificial Sequence
  Synthetic
FYGSYSGLGSSL

SEQ ID NO: 3948 - protein, 12 aa, Artificial Sequence
  Synthetic
FYGSYSGLGSSL

SEQ ID NO: 3949 - protein, 12 aa, Artificial Sequence
  Synthetic
FYGSYSGLGSSL

SEQ ID NO: 3950 - protein, 12 aa, Artificial Sequence
  Synthetic
FYGSYSGLGSSL

SEQ ID NO: 3951 - protein, 12 aa, Artificial Sequence
  Synthetic
FYGSYSGLGSSL

SEQ ID NO: 3952 - protein, 12 aa, Artificial Sequence
  Synthetic
FYGSYSGLGSSL

SEQ ID NO: 3953 - protein, 12 aa, Artificial Sequence
  Synthetic
FYGSYSGLGSSL

SEQ ID NO: 3954 - protein, 12 aa, Artificial Sequence
  Synthetic
FYGSYSGLGSSL

SEQ ID NO: 3955 - protein, 12 aa, Artificial Sequence
  Synthetic
FYGSYSGLGSSL

SEQ ID NO: 3956 - protein, 12 aa, Artificial Sequence
  Synthetic
FYGSYSGLGSSL

SEQ ID NO: 3957 - protein, 12 aa, Artificial Sequence
  Synthetic
FYGSYSGLGSSL

SEQ ID NO: 3958 - protein, 12 aa, Artificial Sequence
  Synthetic
FYGSYSGLGSSL

SEQ ID NO: 3959 - protein, 12 aa, Artificial Sequence
  Synthetic
FYGSYSGLGSSL

SEQ ID NO: 3960 - protein, 12 aa, Artificial Sequence
  Synthetic
FYGSYSGLGSSL

SEQ ID NO: 3961 - protein, 12 aa, Artificial Sequence
  Synthetic
FYGSYSGLGSSL

SEQ ID NO: 3962 - protein, 12 aa, Artificial Sequence
  Synthetic
FYGSYSGLGSSL

SEQ ID NO: 3963 - protein, 12 aa, Artificial Sequence
  Synthetic
FYGSYSGLGSSL

SEQ ID NO: 3964 - protein, 12 aa, Artificial Sequence
  Synthetic
FYGSYSGLGSSL

SEQ ID NO: 3965 - protein, 12 aa, Artificial Sequence
  Synthetic
FYGSYSGLGSSL

SEQ ID NO: 3966 - protein, 12 aa, Artificial Sequence
  Synthetic
FYGSYSGLGSSL

SEQ ID NO: 3967 - protein, 12 aa, Artificial Sequence
  Synthetic
FYGSYSGLGSSL

SEQ ID NO: 3968 - protein, 12 aa, Artificial Sequence
  Synthetic
FYGSYSGLGSSL

SEQ ID NO: 3969 - protein, 12 aa, Artificial Sequence
  Synthetic
FYGSYSGLGSSL

SEQ ID NO: 3970 - protein, 12 aa, Artificial Sequence
  Synthetic
FYGSYSGLGSSL

SEQ ID NO: 3971 - protein, 12 aa, Artificial Sequence
  Synthetic
FYGSYSGLGSSL

SEQ ID NO: 3972 - protein, 12 aa, Artificial Sequence
  Synthetic
FYGSYSGLGSSL

SEQ ID NO: 3973 - protein, 12 aa, Artificial Sequence
  Synthetic
FYGSYSGLGSSL

SEQ ID NO: 3974 - protein, 12 aa, Artificial Sequence
  Synthetic
FYGSYSGLGSSL

SEQ ID NO: 3975 - protein, 12 aa, Artificial Sequence
  Synthetic
FYGSYSGLGSSL

SEQ ID NO: 3976 - protein, 12 aa, Artificial Sequence
  Synthetic
FYGSYSGLGSSL

SEQ ID NO: 3977 - protein, 12 aa, Artificial Sequence
  Synthetic
FYGSYSGLGSSL

SEQ ID NO: 3978 - protein, 12 aa, Artificial Sequence
  Synthetic
FYGSYSGLGSSL

SEQ ID NO: 3979 - protein, 12 aa, Artificial Sequence
  Synthetic
FYGSYSGLGSSL

SEQ ID NO: 3980 - protein, 12 aa, Artificial Sequence
  Synthetic
FYGSYSGLGSSL

SEQ ID NO: 3981 - protein, 12 aa, Artificial Sequence
  Synthetic
FYGSYSGLGSSL

SEQ ID NO: 3982 - protein, 12 aa, Artificial Sequence
  Synthetic
FYGSYSGLGSSL

SEQ ID NO: 3983 - protein, 12 aa, Artificial Sequence
  Synthetic
FYGSYSGLGSSL

SEQ ID NO: 3984 - protein, 12 aa, Artificial Sequence
  Synthetic
FYGSYSGLGSSL

SEQ ID NO: 3985 - protein, 12 aa, Artificial Sequence
  Synthetic
FYGSYSGLGSSL

SEQ ID NO: 3986 - protein, 12 aa, Artificial Sequence
  Synthetic
FYGSYSGLGSSL

SEQ ID NO: 3987 - protein, 12 aa, Artificial Sequence
  Synthetic
FYGSYSGLGSSL

SEQ ID NO: 3988 - protein, 12 aa, Artificial Sequence
  Synthetic
FYGSYSGLGSSL

SEQ ID NO: 3989 - protein, 12 aa, Artificial Sequence
  Synthetic
FYGSYSGLGSSL

SEQ ID NO: 3990 - protein, 12 aa, Artificial Sequence
  Synthetic
FYGSYSGLGSSL

SEQ ID NO: 3991 - protein, 12 aa, Artificial Sequence
  Synthetic
FYGSYSGLGSSL

SEQ ID NO: 3992 - protein, 12 aa, Artificial Sequence
  Synthetic
FYGSYSGLGSSL

SEQ ID NO: 3993 - protein, 12 aa, Artificial Sequence
  Synthetic
FYGSYSGLGSSL

SEQ ID NO: 3994 - protein, 24 aa, Artificial Sequence
  Synthetic
KYLTSLGSNFGGIFVYPLFLLSTF

SEQ ID NO: 3995 - protein, 38 aa, Artificial Sequence
  Synthetic
RGCGGLMAGCDGKSTFCCSGYNCSPTWKWCVYARPGRR

SEQ ID NO: 3996 - protein, 38 aa, Artificial Sequence; identical to SEQ ID NO: 3995
  Synthetic

SEQ ID NO: 3997 - protein, 23 aa, Artificial Sequence
  Synthetic
SLQNCVETCVHGLRRNQDLYVNE

SEQ ID NO: 3998 - protein, 12 aa, Artificial Sequence
  Synthetic
FQEAYRRFYGPV

SEQ ID NO: 3999 - protein, 12 aa, Artificial Sequence
  Synthetic
FQEAYRRFYGPV

SEQ ID NO: 4000 - protein, 18 aa, Artificial Sequence
  Synthetic
QAMSGCTELVKQLLQSDE

SEQ ID NO: 4001 - protein, 12 aa, Artificial Sequence
  Synthetic
FYGSYSGLGSSL

SEQ ID NO: 4002 - protein, 17 aa, Artificial Sequence
  Synthetic
LIDVLDEYISGVQTVGK

SEQ ID NO: 4003 - protein, 17 aa, Artificial Sequence
  Synthetic
LIDVLDEYISGVQTVGK

SEQ ID NO: 4004 - protein, 26 aa, Artificial Sequence
  Synthetic
SNFKDLVDSLLQVLNMKEGTPQLNQQ

SEQ ID NO: 4005 - protein, 30 aa, Artificial Sequence
  Synthetic
LTDVVRGCAKTCPTPIEEEEVYCCLKDNCN

SEQ ID NO: 4006 - protein, 39 aa, Artificial Sequence
  Synthetic
DWVNDGLSSLKDYWGKLKGKFSSFWDSTFEDTTPSPAVA

SEQ ID NO: 4007 - protein, 32 aa, Artificial Sequence
  Synthetic
RGMWGKCKDGLTTCLAPSECCSGNCEQNCKMW

SEQ ID NO: 4008 - protein, 32 aa, Artificial Sequence; identical to SEQ ID NO: 4007
  Synthetic

SEQ ID NO: 4009 - protein, 31 aa, Artificial Sequence
  Synthetic
DDLVDALTKLARGLKAQTSPEQLCGLLKICK

SEQ ID NO: 4010 - protein, 14 aa, Artificial Sequence
  Synthetic
FEELGSKIAQLFTG

SEQ ID NO: 4011 - protein, 14 aa, Artificial Sequence
  Synthetic
FEELGSKIAQLFTG

SEQ ID NO: 4012 - protein, 14 aa, Artificial Sequence
  Synthetic
FEELGSKIAQLFTG

SEQ ID NO: 4013 - protein, 41 aa, Artificial Sequence
  Synthetic
DYYGDLAAHLGYFPSSIVREDLTLKPGKVDMKTDEWDFYCQ

SEQ ID NO: 4014 - protein, 41 aa, Artificial Sequence
  Synthetic
ARGSDVGDDIKEKFKKLVLEQNFPEAHIKYFNAEQCTPTAA

SEQ ID NO: 4015 - protein, 18 aa, Artificial Sequence
  Synthetic
GSSAGAKCMNGKCKCYNN

SEQ ID NO: 4016 - protein, 18 aa, Artificial Sequence
  Synthetic
NISYVLREIMKHVDDNNK

SEQ ID NO: 4017 - protein, 17 aa, Artificial Sequence
  Synthetic
LIDELRSLGQGIQGQQY

SEQ ID NO: 4018 - protein, 17 aa, Artificial Sequence
  Synthetic
LIDELRSLGQGIQGQQY

SEQ ID NO: 4019 - protein, 38 aa, Artificial Sequence
  Synthetic
HCAKRIVSGARGMNNWVEWRLHCSGRPLFYWLTGCRLR

SEQ ID NO: 4020 - protein, 20 aa, Artificial Sequence
  Synthetic
LFKTLLSAVGSALSSSGDQE

SEQ ID NO: 4021 - protein, 28 aa, Artificial Sequence
  Synthetic
EAMKEAVERCNNACSEVCTKGSYAVVNA

SEQ ID NO: 4022 - protein, 26 aa, Artificial Sequence
  Synthetic
VSWGDNVAAAWNKALDNTMAVAVAHL

SEQ ID NO: 4023 - protein, 26 aa, Artificial Sequence
  Synthetic
VSWGDNVAAAWNKALDNTMAVAVAHL

SEQ ID NO: 4024 - protein, 27 aa, Artificial Sequence
  Synthetic
KSFSEAIDKLSNVLEPNKKNENKEQQA

SEQ ID NO: 4025 - protein, 25 aa, Artificial Sequence
  Synthetic
GLLSSLSSVAKHVLPHVVPVIAEHL

SEQ ID NO: 4026 - protein, 25 aa, Artificial Sequence
  Synthetic
GLLSSLSSVAKHVLPHVVPVIAEHL

SEQ ID NO: 4027 - protein, 35 aa, Artificial Sequence
  Synthetic
EASSCCSSCFSRASSPATPLLTPLRNSRSPSMVAF

SEQ ID NO: 4028 - protein, 24 aa, Artificial Sequence
  Synthetic
IYGGCGGNANNFKTIEECKSTCAA

SEQ ID NO: 4029 - protein, 27 aa, Artificial Sequence
  Synthetic
KECWAPCKAAFGVDRGKCMGKKCKCYV

SEQ ID NO: 4030 - protein, 41 aa, Artificial Sequence; identical to SEQ ID NO: 3789
  Synthetic

SEQ ID NO: 4031 - protein, 29 aa, Artificial Sequence
  Synthetic
EEANDAVESCDQACSSFCNVHVGAATVVA

SEQ ID NO: 4032 - protein, 20 aa, Artificial Sequence
  Synthetic
LFKTLLSAVGSALSSSGEQE

SEQ ID NO: 4033 - protein, 20 aa, Artificial Sequence
  Synthetic
LFKTLLSAVGSALSSSGEQE

SEQ ID NO: 4034 - protein, 15 aa, Artificial Sequence
  Synthetic
CGDAHHFYRGCTCTC

SEQ ID NO: 4035 - protein, 42 aa, Artificial Sequence
  Synthetic
AVEEVKSAFSKLQERGVYKAMGEFDIFINYIEAYMTMKMRKN

SEQ ID NO: 4036 - protein, 17 aa, Artificial Sequence
  Synthetic
LESVLRKLLDQAKAITQ

SEQ ID NO: 4037 - protein, 14 aa, Artificial Sequence
  Synthetic
FEELGSKLAQLFTG

SEQ ID NO: 4038 - protein, 29 aa, Artificial Sequence
  Synthetic
EEANDAVESCDQACSSFCSVHVGSATVVA

SEQ ID NO: 4039 - protein, 29 aa, Artificial Sequence
  Synthetic
EEANDAVESCDQACSSFCSVHVGSATVVA

SEQ ID NO: 4040 - protein, 20 aa, Artificial Sequence
  Synthetic
AVEFLNKWITFCQSIYSTLT

SEQ ID NO: 4041 - protein, 23 aa, Artificial Sequence
  Synthetic
HAFEFMQRALQDLKKTVYNLDTR

SEQ ID NO: 4042 - protein, 33 aa, Artificial Sequence
  Synthetic
EEVMEKFSRALQPLPGRVQIVQDPSGGQERCGF

SEQ ID NO: 4043 - protein, 23 aa, Artificial Sequence
  Synthetic
CNEGWEKCTAVYTPVASCCRKKK

SEQ ID NO: 4044 - protein, 27 aa, Artificial Sequence
  Synthetic
VEALSHVLEKLVEILRNDDPDINTFSK

SEQ ID NO: 4045 - protein, 34 aa, Artificial Sequence
  Synthetic
GDLERAAASLPAFCNVDIPNGGGGVCYWLARSGY

SEQ ID NO: 4046 - protein, 23 aa, Artificial Sequence
  Synthetic
NNLYSCISQWQRCFNNCESNNQY

SEQ ID NO: 4047 - protein, 35 aa, Artificial Sequence
  Synthetic
SLGSFIASLFAGAFIALAIGGVLVFISQSDRVTRS

SEQ ID NO: 4048 - protein, 11 aa, Artificial Sequence
  Synthetic
VAMIEAVIEKY

SEQ ID NO: 4049 - protein, 18 aa, Artificial Sequence
  Synthetic
LRELVSNAADACDKRRFL

SEQ ID NO: 4050 - protein, 13 aa, Artificial Sequence
  Synthetic
HAINAVSAIAKHN

SEQ ID NO: 4051 - protein, 20 aa, Artificial Sequence
  Synthetic
RCCSGGCSSGKCVNGACDCS

SEQ ID NO: 4052 - protein, 32 aa, Artificial Sequence
  Synthetic
FSTMLQEAIESFKEALKQKVDFIDAYKSLGQA

SEQ ID NO: 4053 - protein, 21 aa, Artificial Sequence
  Synthetic
GIVDQCCTNICSRNQLLTYCN

SEQ ID NO: 4054 - protein, 16 aa, Artificial Sequence
  Synthetic
VLGLVGNALGGLIKNE

SEQ ID NO: 4055 - protein, 23 aa, Artificial Sequence
  Synthetic
LADTMMKIFQQLMDRTKALPAPQ

SEQ ID NO: 4056 - protein, 27 aa, Artificial Sequence
  Synthetic
DAEQAWNQAFDCIYEVIFSNLDGHPVV

SEQ ID NO: 4057 - protein, 16 aa, Artificial Sequence
  Synthetic
VLSLVGNALGGLLKNE

SEQ ID NO: 4058 - protein, 13 aa, Artificial Sequence
  Synthetic
KRLTKMGGDLNSP

SEQ ID NO: 4059 - protein, 26 aa, Artificial Sequence
  Synthetic
LNAYFEAYQAIFPFLLEAFLRKEQKV

SEQ ID NO: 4060 - protein, 42 aa, Artificial Sequence
  Synthetic
NGCADTCESYARMHNGGPNGCKSSHHHATDNYWRLVQAKGCS

SEQ ID NO: 4061 - protein, 12 aa, Artificial Sequence
  Synthetic
GIPKVMNDAGRR

SEQ ID NO: 4062 - protein, 25 aa, Artificial Sequence
  Synthetic
LIGRCPSGWHNCRGSGPFIGYCCKQ

SEQ ID NO: 4063 - protein, 28 aa, Artificial Sequence
  Synthetic
ASSIFKTLRTIANDDCELCVNVACTGCL

SEQ ID NO: 4064 - protein, 28 aa, Artificial Sequence
  Synthetic
CYTGYNGVGKCIASKASRTPNCVCTYNC

SEQ ID NO: 4065 - protein, 33 aa, Artificial Sequence
  Synthetic
FSSLKDYWSTVKDKLSGFWDLNPEAKPTLAEAA

SEQ ID NO: 4066 - protein, 32 aa, Artificial Sequence
  Synthetic
VRQMYRVASNIPSMCNLQPMSCLFRQQQSSWL

SEQ ID NO: 4067 - protein, 33 aa, Artificial Sequence
  Synthetic
IYGGCGGNANNFHTLEECEKVCGVRSRDSPKEN

SEQ ID NO: 4068 - protein, 11 aa, Artificial Sequence
  Synthetic
VAMIEAVIEKY

SEQ ID NO: 4069 - protein, 24 aa, Artificial Sequence
  Synthetic
IYGGCYGNANNFKTIDECKRTCAA

SEQ ID NO: 4070 - protein, 18 aa, Artificial Sequence
  Synthetic
AAWGATLDTFFGMIFSKM

SEQ ID NO: 4071 - protein, 12 aa, Artificial Sequence
  Synthetic
VLNSLDNLVSGL

SEQ ID NO: 4072 - protein, 12 aa, Artificial Sequence
  Synthetic
VLNSLDNLVSGL

SEQ ID NO: 4073 - protein, 32 aa, Artificial Sequence
  Synthetic
NVNEIFYDLVRQINRKTPVPGKARKKSTCHLL

SEQ ID NO: 4074 - protein, 40 aa, Artificial Sequence
  Synthetic
LSSIGQCGEDWVVKGCAKTCPTAGPGERVKCCYSPRCNKN

SEQ ID NO: 4075 - protein, 34 aa, Artificial Sequence
  Synthetic
DDLNKWAYKAYKCATSGRFGHWVNEYMKQEMETK

SEQ ID NO: 4076 - protein, 18 aa, Artificial Sequence
  Synthetic
GAGKGVLTTLSCKLDKSC

SEQ ID NO: 4077 - protein, 21 aa, Artificial Sequence
  Synthetic
GEAFAAALDGFRRLPYRLSSE

SEQ ID NO: 4078 - protein, 21 aa, Artificial Sequence
  Synthetic
DSIFSKMYNCWRKCALGDEKK

SEQ ID NO: 4079 - protein, 28 aa, Artificial Sequence
  Synthetic
NILRLFQEIINSITEKNLSFSPFVSLHI

SEQ ID NO: 4080 - protein, 37 aa, Artificial Sequence
  Synthetic
IAAVVDVIRELGICPDDAAVIPIKSNRFYTTETLKVE

SEQ ID NO: 4081 - protein, 34 aa, Artificial Sequence
  Synthetic
MTEYMNFVEEMGIEDENVQRVMDTDTCPNKIRIR

SEQ ID NO: 4082 - protein, 42 aa, Artificial Sequence
  Synthetic
LQNAGTQLKRLVDTLPQETRINIMKLTEKILTSPLCKQDLRF

SEQ ID NO: 4083 - protein, 17 aa, Artificial Sequence
  Synthetic
AAKEFVSWLKTGRGRRD

SEQ ID NO: 4084 - protein, 33 aa, Artificial Sequence
  Synthetic
NEVMEKFDRALKTLPVHMRIVLDLSQGKGELGP

SEQ ID NO: 4085 - protein, 30 aa, Artificial Sequence
  Synthetic
LTVLDGAAGDLLLRLMHLANRQQQGKQPGL

SEQ ID NO: 4086 - protein, 18 aa, Artificial Sequence
  Synthetic
DVFQCINNICKCVSHHRT

SEQ ID NO: 4087 - protein, 20 aa, Artificial Sequence
  Synthetic
SDLVSSAQRFIYNLQSIYST

SEQ ID NO: 4088 - protein, 20 aa, Artificial Sequence
  Synthetic
LAEQLMEKIKSLWYTKVLGY

SEQ ID NO: 4089 - protein, 22 aa, Artificial Sequence
  Synthetic
SDAISYVTKLASNALAFINHLF

SEQ ID NO: 4090 - protein, 22 aa, Artificial Sequence
  Synthetic
SDAISYVTKLASNALAFINHLY

SEQ ID NO: 4091 - protein, 30 aa, Artificial Sequence
  Synthetic
GKRGMGAWPSWTLNCQHSDTLARWLDGCKL

SEQ ID NO: 4092 - protein, 18 aa, Artificial Sequence
  Synthetic
LSSVIRNVFKICSENIFV

SEQ ID NO: 4093 - protein, 28 aa, Artificial Sequence
  Synthetic
DKAEHAWHDAMDKMYFVIFSSLDGHPVQ

SEQ ID NO: 4094 - protein, 12 aa, Artificial Sequence
  Synthetic
FQEAYRRFYGIA

SEQ ID NO: 4095 - protein, 24 aa, Artificial Sequence
  Synthetic
VLDWFGQGLNAMGNAISRYYCDAE

SEQ ID NO: 4096 - protein, 19 aa, Artificial Sequence
  Synthetic
KWVEEAIAYLDMKTPTPKP

SEQ ID NO: 4097 - protein, 26 aa, Artificial Sequence
  Synthetic
DAVQSACKYVRQAAVAARATQALIKK

SEQ ID NO: 4098 - protein, 12 aa, Artificial Sequence
  Synthetic
GIPKVMNDAGRR

SEQ ID NO: 4099 - protein, 21 aa, Artificial Sequence
  Synthetic
RTLWKIWDYICEVLTWIWGED

SEQ ID NO: 4100 - protein, 42 aa, Artificial Sequence
  Synthetic
ACKCIKSAAGGLNAGKAAGIPSMCGVSVPYAISASVDCSKIR

SEQ ID NO: 4101 - protein, 42 aa, Artificial Sequence; identical to SEQ ID NO: 4100
  Synthetic

SEQ ID NO: 4102 - protein, 42 aa, Artificial Sequence; identical to SEQ ID NO: 4100
  Synthetic

SEQ ID NO: 4103 - protein, 28 aa, Artificial Sequence
  Synthetic
RDYYGSVPSYCNRIGTPIAECACSLTPC

SEQ ID NO: 4104 - protein, 23 aa, Artificial Sequence
  Synthetic
GQALGKFLQEVLWEDTNEALADE

SEQ ID NO: 4105 - protein, 11 aa, Artificial Sequence
  Synthetic
EWIQKGLEWVE

SEQ ID NO: 4106 - protein, 21 aa, Artificial Sequence
  Synthetic
RAFDCLGQCGRCDFHKLQCVH

SEQ ID NO: 4107 - protein, 21 aa, Artificial Sequence
  Synthetic
CDSARKCCEGLVCRLWCKKII

SEQ ID NO: 4108 - protein, 29 aa, Artificial Sequence
  Synthetic
DDVAKDVEEVVDEIVDEVADAVEDAEKTE

SEQ ID NO: 4109 - protein, 21 aa, Artificial Sequence
  Synthetic
ALQKYLASILGSRTSPPPPSR

SEQ ID NO: 4110 - protein, 21 aa, Artificial Sequence
  Synthetic
ALQKYLASILGSRTSPPPPSR

SEQ ID NO: 4111 - protein, 14 aa, Artificial Sequence
  Synthetic
FWHCVDSVCKCFFF

SEQ ID NO: 4112 - protein, 22 aa, Artificial Sequence
  Synthetic
CNEGWEKCASYYSPIAECCRKK

SEQ ID NO: 4113 - protein, 35 aa, Artificial Sequence
  Synthetic
TAFSSVTHICRDVNYGWIIRYMHANGASMFFICLF

SEQ ID NO: 4114 - protein, 28 aa, Artificial Sequence
  Synthetic
TAFSSVTHICRDVNYGWIIRYMHANGAS

SEQ ID NO: 4115 - protein, 28 aa, Artificial Sequence
  Synthetic
TAFSSVTHICRDVNYGWIIRYMHANGAS

SEQ ID NO: 4116 - protein, 27 aa, Artificial Sequence
  Synthetic
DAEQAWNQAFDCIYEVIFSNLDGHPVV

SEQ ID NO: 4117 - protein, 11 aa, Artificial Sequence
  Synthetic
IGALFARGGNL

SEQ ID NO: 4118 - protein, 42 aa, Artificial Sequence
  Synthetic
CLKSAANAIKGIDMGKAAGLPGACGVNIPYKISPSTDCSKVQ

SEQ ID NO: 4119 - protein, 13 aa, Artificial Sequence
  Synthetic
ERLRKMGGDLNSP

SEQ ID NO: 4120 - protein, 42 aa, Artificial Sequence
  Synthetic
DNLPSIGRAILNKRTTCMHDVGSKIYCGPKKQRFLLCWSTKL

SEQ ID NO: 4121 - protein, 20 aa, Artificial Sequence
  Synthetic
GGFRLGGHCGHPKIRCCRRK

SEQ ID NO: 4122 - protein, 29 aa, Artificial Sequence
  Synthetic
ENLHDIAHSLASGISDAIQKGVEDFEDVA

SEQ ID NO: 4123 - protein, 42 aa, Artificial Sequence
  Synthetic
KHVIGIASKLGKRSEEKRFWPFMGKRSEEKRFWPFMGKRSEE

SEQ ID NO: 4124 - protein, 27 aa, Artificial Sequence
  Synthetic
CQTFCSSLSAVLIGVCESGICCCILNQ

SEQ ID NO: 4125 - protein, 12 aa, Artificial Sequence
  Synthetic
VNKACSGCTHGK

SEQ ID NO: 4126 - protein, 33 aa, Artificial Sequence
  Synthetic
DDCAKYCSQFTDVHPACLGGYCECLRWEGGISS

SEQ ID NO: 4127 - protein, 36 aa, Artificial Sequence
  Synthetic
RGCKGFGDSCTPGKNERCPNYACSSKHKWCKVYLGK

SEQ ID NO: 4128 - protein, 40 aa, Artificial Sequence
  Synthetic
LDRASDGGNAVAKKSDVTARFNWRCCLIPACRRNHKKFCG

SEQ ID NO: 4129 - protein, 12 aa, Artificial Sequence
  Synthetic
METILEEVMTEV

SEQ ID NO: 4130 - protein, 28 aa, Artificial Sequence
  Synthetic
CRDWYDECCEGFYCSCRQPPKCICRNNN

SEQ ID NO: 4131 - protein, 15 aa, Artificial Sequence
  Synthetic
LEKVLNKAPRVVTSQ

SEQ ID NO: 4132 - protein, 11 aa, Artificial Sequence
  Synthetic
WRALETLLEDY

SEQ ID NO: 4133 - protein, 12 aa, Artificial Sequence
  Synthetic
FREVVDDLMGYD

SEQ ID NO: 4134 - protein, 12 aa, Artificial Sequence
  Synthetic
FREVVDDLMGYD

SEQ ID NO: 4135 - protein, 22 aa, Artificial Sequence
  Synthetic
DNVAQAWNDAFDQVYAIVLSRY

SEQ ID NO: 4136 - protein, 21 aa, Artificial Sequence
  Synthetic
GMAALMEELRGLGQGIQGQQY

SEQ ID NO: 4137 - protein, 20 aa, Artificial Sequence
  Synthetic
LAEQLMEKVKNLWYTRVLGY

SEQ ID NO: 4138 - protein, 24 aa, Artificial Sequence
  Synthetic
CAAHCLAIGRRGGSCERGVCICRR

SEQ ID NO: 4139 - protein, 24 aa, Artificial Sequence
  Synthetic
MYGGCGGNANNFKTIDECHRTCVG

SEQ ID NO: 4140 - protein, 20 aa, Artificial Sequence
  Synthetic
MAQYAAELRRYINMLTRPRY

SEQ ID NO: 4141 - protein, 28 aa, Artificial Sequence
  Synthetic
LMSTLKGAATNAAVTLLNKLQCKLTGTC

SEQ ID NO: 4142 - protein, 39 aa, Artificial Sequence
  Synthetic
TCVDSMADPVRVKRFWPLVPVAINTVAAGINLYKAIRRK

SEQ ID NO: 4143 - protein, 24 aa, Artificial Sequence
  Synthetic
RKIAQLLNKVADAAKKGEKVDMFD

SEQ ID NO: 4144 - protein, 21 aa, Artificial Sequence
  Synthetic
ATLERLLGQAPQSTQNQNAAK

SEQ ID NO: 4145 - protein, 42 aa, Artificial Sequence
  Synthetic
RSWTAVAGDGLKREIRRECAATCPPSKLGLTVFCCTTDNCNH

SEQ ID NO: 4146 - protein, 41 aa, Artificial Sequence
  Synthetic
CRCLKSVAGAYNAGRAAGIPSRCGVSVPYTISASVDCSKIH

SEQ ID NO: 4147 - protein, 39 aa, Artificial Sequence
  Synthetic
DLCNEALQSWQSAAPARTSAHLGLALACGLLALLWAPGL

SEQ ID NO: 4148 - protein, 22 aa, Artificial Sequence
  Synthetic
DVFDCISDMITDYCSGQMEDDH

SEQ ID NO: 4149 - protein, 27 aa, Artificial Sequence
  Synthetic
YLKSLYGGYGNGNGEFWEEYIDERYDK

SEQ ID NO: 4150 - protein, 17 aa, Artificial Sequence
  Synthetic
LIDVVDEYISGVQTVGK

SEQ ID NO: 4151 - protein, 17 aa, Artificial Sequence
  Synthetic
DIEDVANYVLSKADKGW

SEQ ID NO: 4152 - protein, 38 aa, Artificial Sequence
  Synthetic
RFCTEIGKDCGTSWECCEDCCIHGTCSHESNCANFKLR

SEQ ID NO: 4153 - protein, 26 aa, Artificial Sequence
  Synthetic
AKALFNKLTEYLKKKISGEDAAKKDT

SEQ ID NO: 4154 - protein, 21 aa, Artificial Sequence
  Synthetic
QSIADTIKDAFDKAQAVFMDA

SEQ ID NO: 4155 - protein, 25 aa, Artificial Sequence
  Synthetic
MKEYLESCEHACDSLIQEEIFNYFQ

SEQ ID NO: 4156 - protein, 32 aa, Artificial Sequence
  Synthetic
EKLDNALKYIIEKLKIHDTPEKICTDIHFCVV

SEQ ID NO: 4157 - protein, 39 aa, Artificial Sequence
  Synthetic
QYLEVIHSAVQILLSLVGFVYACYVISISMEEEDTCRNK

SEQ ID NO: 4158 - protein, 11 aa, Artificial Sequence
  Synthetic
WRALETLLEEY

SEQ ID NO: 4159 - protein, 11 aa, Artificial Sequence
  Synthetic
TGWRLCENILA

SEQ ID NO: 4160 - protein, 15 aa, Artificial Sequence
  Synthetic
NALALVNNFAAKHKH

SEQ ID NO: 4161 - protein, 14 aa, Artificial Sequence
  Synthetic
AGLMAAIFGAMLLL

SEQ ID NO: 4162 - protein, 30 aa, Artificial Sequence
  Synthetic
RCRDWYNDCCDGFYCSCRQPPYCICRNNNG

SEQ ID NO: 4163 - protein, 22 aa, Artificial Sequence
  Synthetic
KSFKDFLQNILHLAEAHAVKRG

SEQ ID NO: 4164 - protein, 27 aa, Artificial Sequence
  Synthetic
ADQAANEWGRSGKDPNHFRPAGLPDKY

SEQ ID NO: 4165 - protein, 27 aa, Artificial Sequence
  Synthetic
ADQAANEWGRSGKDPNHFRPKGLPDKY

SEQ ID NO: 4166 - protein, 27 aa, Artificial Sequence
  Synthetic
ADQAANEWGRSGKDPNHFRPKGLPDKY

SEQ ID NO: 4167 - protein, 22 aa, Artificial Sequence
  Synthetic
LMEHIKEFFNEMLTKEDVKLFD

SEQ ID NO: 4168 - protein, 42 aa, Artificial Sequence
  Synthetic
CMKSAASSITKLNTNNAAALPGKCGVNIPYKISTSTNCNTVK

SEQ ID NO: 4169 - protein, 24 aa, Artificial Sequence
  Synthetic
NDCQRYCQSVKECKYGKCYCNYAG

SEQ ID NO: 4170 - protein, 37 aa, Artificial Sequence
  Synthetic
GMRVVRGCAASCPSPIGGEEVSCCSTDNCNNSFSRFF

SEQ ID NO: 4171 - protein, 12 aa, Artificial Sequence
  Synthetic
GGCHELCHCCGS

SEQ ID NO: 4172 - protein, 11 aa, Artificial Sequence
  Synthetic
VAMIEAVIEKY

SEQ ID NO: 4173 - protein, 16 aa, Artificial Sequence
  Synthetic
FSNAAQSIASDAQNLG

SEQ ID NO: 4174 - protein, 31 aa, Artificial Sequence
  Synthetic
WQVIGQLVSTGAIMLLGPAIIILLALKKGNL

SEQ ID NO: 4175 - protein, 27 aa, Artificial Sequence
  Synthetic
SVARHAARDLRRWMWCNLKVCVGGLVV

SEQ ID NO: 4176 - protein, 12 aa, Artificial Sequence
  Synthetic
GLPKVMNEAGRR

SEQ ID NO: 4177 - protein, 30 aa, Artificial Sequence
  Synthetic
VNQVAKSINDLDYTPIMKSMENLDNGMDML

SEQ ID NO: 4178 - protein, 18 aa, Artificial Sequence
  Synthetic
NILSSIVNGINRALSFFG

SEQ ID NO: 4179 - protein, 31 aa, Artificial Sequence
  Synthetic
RRLKGVAKKGLGKGCFGLKLDRIGSMSGLGC

SEQ ID NO: 4180 - protein, 25 aa, Artificial Sequence
  Synthetic
GLLSVLGSVAKHVLPHVVPVIAEHL

SEQ ID NO: 4181 - protein, 25 aa, Artificial Sequence
  Synthetic
GLLSVLGSVAKHVLPHVVPVIAEHL

SEQ ID NO: 4182 - protein, 25 aa, Artificial Sequence
  Synthetic
GLLSVLGSVAKHVLPHVVPVIAEHL

SEQ ID NO: 4183 - protein, 25 aa, Artificial Sequence
  Synthetic
GLLSVLGSVAKHVLPHVVPVIAEHL

SEQ ID NO: 4184 - protein, 20 aa, Artificial Sequence
  Synthetic
AGGCATGFLRTADGRCKPTF

SEQ ID NO: 4185 - protein, 39 aa, Artificial Sequence
  Synthetic
TGMAGGEEAIGGQFMQRMVKKSVPFKPRLGKRAQVCGGD

SEQ ID NO: 4186 - protein, 20 aa, Artificial Sequence
  Synthetic
MAEYVADLRRYINMLTRPRY

SEQ ID NO: 4187 - protein, 30 aa, Artificial Sequence
  Synthetic
AISKIVDAAEDILQQALNAVPDAHHNCVFG

SEQ ID NO: 4188 - protein, 13 aa, Artificial Sequence
  Synthetic
AAKEFVSWLKTGR

SEQ ID NO: 4189 - protein, 13 aa, Artificial Sequence
  Synthetic
AAKEFVSWLKTGR

SEQ ID NO: 4190 - protein, 12 aa, Artificial Sequence
  Synthetic
ICTNYGQCVRHF

SEQ ID NO: 4191 - protein, 20 aa, Artificial Sequence
  Synthetic
VLDIFKDAAKQILAHAAEQI

SEQ ID NO: 4192 - protein, 41 aa, Artificial Sequence
  Synthetic
RNLKRAMATGSGSNLRLRKSEMPADPYHVTICEIWGEESSS

SEQ ID NO: 4193 - protein, 15 aa, Artificial Sequence
  Synthetic
LANTINQLATKCLSK

SEQ ID NO: 4194 - protein, 16 aa, Artificial Sequence
  Synthetic
RDVVRDAQELVNNLTA

SEQ ID NO: 4195 - protein, 25 aa, Artificial Sequence
  Synthetic
GLLGVLGSVAKHVLPHVVPVIAEHL

SEQ ID NO: 4196 - protein, 15 aa, Artificial Sequence
  Synthetic
FPDCCNSICAQFICL

SEQ ID NO: 4197 - protein, 20 aa, Artificial Sequence
  Synthetic
SQAGGGMSSFKTRVKSRILK

SEQ ID NO: 4198 - protein, 40 aa, Artificial Sequence
  Synthetic
VSELKRIGRELSVQNEVDRFSPGGPDPQHHSYPLSSKPRI

SEQ ID NO: 4199 - protein, 12 aa, Artificial Sequence
  Synthetic
LLDMVTGLLGNL

SEQ ID NO: 4200 - protein, 39 aa, Artificial Sequence
  Synthetic
GDLERAAASLPAFCNVDIPNGTGGVCYWLGYPRTPRTGH

SEQ ID NO: 4201 - protein, 26 aa, Artificial Sequence
  Synthetic
FQQALTDILDGMTEVAEETGEGGREG

SEQ ID NO: 4202 - protein, 12 aa, Artificial Sequence
  Synthetic
FQEAYRRFYGIA

SEQ ID NO: 4203 - protein, 33 aa, Artificial Sequence
  Synthetic
GRNAAANAFDLIALIARQNCCSIPSCWEKYKCS

SEQ ID NO: 4204 - protein, 21 aa, Artificial Sequence
  Synthetic
RTMAKTFIEWLEKQNSNDQTD

SEQ ID NO: 4205 - protein, 25 aa, Artificial Sequence
  Synthetic
IPDAIQRALDYIRSLPPPKENQKFK

SEQ ID NO: 4206 - protein, 25 aa, Artificial Sequence
  Synthetic
IPDAIQRALDYIRSLPPPKENQKFK

SEQ ID NO: 4207 - protein, 12 aa, Artificial Sequence
  Synthetic
VLNSLDNLVSGL

SEQ ID NO: 4208 - protein, 28 aa, Artificial Sequence
  Synthetic
LFKDGLNTVQEGLQKLNETFLQAPAAST

SEQ ID NO: 4209 - protein, 22 aa, Artificial Sequence
  Synthetic
AIKCIDHVCKFVSNLSQFEDLF

SEQ ID NO: 4210 - protein, 26 aa, Artificial Sequence
  Synthetic
TGLSNALDNLSSSHTKKRACFWKYCV

SEQ ID NO: 4211 - protein, 21 aa, Artificial Sequence
  Synthetic
GMAALMEELRGLGQGIQGQQY

SEQ ID NO: 4212 - protein, 21 aa, Artificial Sequence
  Synthetic
GMAALMEELRGLGQGIQGQQY

SEQ ID NO: 4213 - protein, 21 aa, Artificial Sequence
  Synthetic
GMAALMEELRGLGQGIQGQQY

SEQ ID NO: 4214 - protein, 21 aa, Artificial Sequence
  Synthetic
GMAALMEELRGLGQGIQGQQY

SEQ ID NO: 4215 - protein, 21 aa, Artificial Sequence
  Synthetic
GMAALMEELRGLGQGIQGQQY

SEQ ID NO: 4216 - protein, 12 aa, Artificial Sequence
  Synthetic
FQEAYQRFYGPV

SEQ ID NO: 4217 - protein, 25 aa, Artificial Sequence
  Synthetic
SDAAKKLQEFITFEKGIDGPFTSKN

SEQ ID NO: 4218 - protein, 42 aa, Artificial Sequence
  Synthetic
CLKSAYNSISGVNAGNAASFPGKCGVSIPYKISPSTDCSKVQ

SEQ ID NO: 4219 - protein, 26 aa, Artificial Sequence
  Synthetic
GGGGKKCGGHGEYGSGVIIGAERPKK

SEQ ID NO: 4220 - protein, 18 aa, Artificial Sequence
  Synthetic
NILSSIANGINRALSFFG

SEQ ID NO: 4221 - protein, 15 aa, Artificial Sequence
  Synthetic
RFLEGLLNTVTGLLG

SEQ ID NO: 4222 - protein, 23 aa, Artificial Sequence
  Synthetic
GIVDQCCNNICTFNQLQNYCNVP

SEQ ID NO: 4223 - protein, 21 aa, Artificial Sequence
  Synthetic
TAVKLFRNFLTSFFNNQASTG

SEQ ID NO: 4224 - protein, 16 aa, Artificial Sequence
  Synthetic
KLAKTVAKQAAKKQME

SEQ ID NO: 4225 - protein, 27 aa, Artificial Sequence
  Synthetic
RILEDIVSTALATCCKFQFLNFCCNEK

SEQ ID NO: 4226 - protein, 21 aa, Artificial Sequence
  Synthetic
LRDLKGALESLIEEETGQKKI

SEQ ID NO: 4227 - protein, 28 aa, Artificial Sequence
  Synthetic
QQCLKPCKAAFGISAGGKCINGKCKCYP

SEQ ID NO: 4228 - protein, 38 aa, Artificial Sequence
  Synthetic
ITKASTCAKKIFKRHNFRAWYGWRNHCDGKTLPDTSNC

SEQ ID NO: 4229 - protein, 26 aa, Artificial Sequence
  Synthetic
ACAGGCVSICGHCAPTCGCGYGGLYY

SEQ ID NO: 4230 - protein, 23 aa, Artificial Sequence
  Synthetic
TDFYKVFEKCWDVVSAASSPTAT

SEQ ID NO: 4231 - protein, 27 aa, Artificial Sequence
  Synthetic
DLWNSIKDMAAAAGRAALNAVTGMVNQ

SEQ ID NO: 4232 - protein, 39 aa, Artificial Sequence
  Synthetic
DMAKSALRELKSCIDELQPVHKEQLVKLLVQVLDAQEDT

SEQ ID NO: 4233 - protein, 19 aa, Artificial Sequence
  Synthetic
SELESVLRKLLDQAKAITQ

SEQ ID NO: 4234 - protein, 38 aa, Artificial Sequence
  Synthetic
VDHLGTEVKGLLGLLEELAWNLPPGPFSPAPDLLGDGF

SEQ ID NO: 4235 - protein, 12 aa, Artificial Sequence
  Synthetic
FQEAYRRFYGTA

SEQ ID NO: 4236 - protein, 17 aa, Artificial Sequence
  Synthetic
VANYVDQVVNSAGDAHG

SEQ ID NO: 4237 - protein, 38 aa, Artificial Sequence
  Synthetic
NCAKKIVSGAGGMKNWVKWRLHCAGRPLSYWMTGCHLA

SEQ ID NO: 4238 - protein, 24 aa, Artificial Sequence
  Synthetic
EMMNKAFYPINQVICYFNDPSQCP

SEQ ID NO: 4239 - protein, 32 aa, Artificial Sequence
  Synthetic
YGGCGGNANNFHTLEECVKVCGVRSRDSPKEN

SEQ ID NO: 4240 - protein, 31 aa, Artificial Sequence
  Synthetic
LQQFAEQFMEIIQQIYNSLGYPGIEEKEKVQ

SEQ ID NO: 4241 - protein, 11 aa, Artificial Sequence
  Synthetic
VTMIEAVMEKY

SEQ ID NO: 4242 - protein, 33 aa, Artificial Sequence
  Synthetic
FGKRALRDLNKYDYMSDPSFSAEDIKALRELFR

SEQ ID NO: 4243 - protein, 17 aa, Artificial Sequence
  Synthetic
MKCCSNGCGHACKPPVF

SEQ ID NO: 4244 - protein, 17 aa, Artificial Sequence
  Synthetic
MKCCSNGCGHACKPPVF

SEQ ID NO: 4245 - protein, 26 aa, Artificial Sequence
  Synthetic
DHAKRILQTFESRYDCCKTFECCHWG

SEQ ID NO: 4246 - protein, 13 aa, Artificial Sequence
  Synthetic
QYSRLGGNWARNK

SEQ ID NO: 4247 - protein, 25 aa, Artificial Sequence
  Synthetic
WLAGCPSGWHNCKSSGQLIGACCKQ

SEQ ID NO: 4248 - protein, 24 aa, Artificial Sequence
  Synthetic
DLTDAMEDVLDIFEEGIIPQKKEL

SEQ ID NO: 4249 - protein, 24 aa, Artificial Sequence
  Synthetic
DLTDAMEDVLDIFEEGIIPQKKEL

SEQ ID NO: 4250 - protein, 24 aa, Artificial Sequence
  Synthetic
DLTDAMEDVLDIFEEGIIPQKKEL

SEQ ID NO: 4251 - protein, 24 aa, Artificial Sequence
  Synthetic
DLTDAMEDVLDIFEEGIIPQKKEL

SEQ ID NO: 4252 - protein, 24 aa, Artificial Sequence
  Synthetic
DLTDAMEDVLDIFEEGIIPQKKEL

SEQ ID NO: 4253 - protein, 24 aa, Artificial Sequence
  Synthetic
DLTDAMEDVLDIFEEGIIPQKKEL

SEQ ID NO: 4254 - protein, 35 aa, Artificial Sequence
  Synthetic
FQSLKEFMDACDILGLSKAAVILPKDASRTHTILP

SEQ ID NO: 4255 - protein, 23 aa, Artificial Sequence
  Synthetic
REAERLAYEATSVANDVHDHQAP

SEQ ID NO: 4256 - protein, 20 aa, Artificial Sequence
  Synthetic
LAEQLMEKIKTLWYTKVLGY

SEQ ID NO: 4257 - protein, 18 aa, Artificial Sequence
  Synthetic
NILSSIANGINRALSFFG

SEQ ID NO: 4258 - protein, 33 aa, Artificial Sequence
  Synthetic
SSLKDYCSTFKGKFTGFWDSASEAKPTPASDAF

SEQ ID NO: 4259 - protein, 21 aa, Artificial Sequence
  Synthetic
GEAFAAALDGFRRLPYRLSSE

SEQ ID NO: 4260 - protein, 41 aa, Artificial Sequence
  Synthetic
ADNVIGFCQECAHHCLQRKRVLGECRWFTCHCSRITIGVGL

SEQ ID NO: 4261 - protein, 21 aa, Artificial Sequence
  Synthetic
DTFGAQLQSLLKKKMILEMIN

SEQ ID NO: 4262 - protein, 16 aa, Artificial Sequence
  Synthetic
EAEDAASYFCHQWSSY

SEQ ID NO: 4263 - protein, 33 aa, Artificial Sequence
  Synthetic
DLVRNIKNLISSIVTAIVTAVTTVLATEGNING

SEQ ID NO: 4264 - protein, 25 aa, Artificial Sequence
  Synthetic
LDSMKGYWTSLIGRLSGFLDSTPSS

SEQ ID NO: 4265 - protein, 32 aa, Artificial Sequence
  Synthetic
LSNMLRNLMHLVNQTKCPVNETKITKLQDFLS

SEQ ID NO: 4266 - protein, 24 aa, Artificial Sequence
  Synthetic
LRGCASTCHEGPYNVCCSTDLCNK

SEQ ID NO: 4267 - protein, 23 aa, Artificial Sequence
  Synthetic
AKTGYKGLGHCLGEYDECQSRSY

SEQ ID NO: 4268 - protein, 24 aa, Artificial Sequence
  Synthetic
AAKECHDVLSSFSRLALLSPCPMS

SEQ ID NO: 4269 - protein, 27 aa, Artificial Sequence
  Synthetic
IATFVTDIFQGAKYFRVKMDIKLYECY

SEQ ID NO: 4270 - protein, 11 aa, Artificial Sequence
  Synthetic
LEDCDNACARY

SEQ ID NO: 4271 - protein, 16 aa, Artificial Sequence
  Synthetic
TQYSRLGGNWPRNKKS

SEQ ID NO: 4272 - protein, 33 aa, Artificial Sequence
  Synthetic
EICDRGCKRYGATSGFCKEFSKGENFCWCKGLR

SEQ ID NO: 4273 - protein, 13 aa, Artificial Sequence
  Synthetic
GKDLSDWVDGCEL

SEQ ID NO: 4274 - protein, 11 aa, Artificial Sequence
  Synthetic
VAMIEAVMEKY

SEQ ID NO: 4275 - protein, 21 aa, Artificial Sequence
  Synthetic
GFLHHGCRCCARADEVPEVRN

SEQ ID NO: 4276 - protein, 29 aa, Artificial Sequence
  Synthetic
AVKKYLNSILNGKRSSEGDSADFLEELEK

SEQ ID NO: 4277 - protein, 29 aa, Artificial Sequence
  Synthetic
AVKKYLNSILNGKRSSEGESPDFPEELEK

SEQ ID NO: 4278 - protein, 29 aa, Artificial Sequence
  Synthetic
AVKKYLNSILNGKRSSEGDSPDFLEELEK

SEQ ID NO: 4279 - protein, 29 aa, Artificial Sequence
  Synthetic
AVKKYLNSILNGKRSSEGESPDFLEELEK

SEQ ID NO: 4280 - protein, 31 aa, Artificial Sequence
  Synthetic
RDAGNVLDHGFQRRRECPPRCPTSHCNAGTC

SEQ ID NO: 4281 - protein, 26 aa, Artificial Sequence
  Synthetic
YSIIDKLGKIVDDLVLCMEENAPKLT

SEQ ID NO: 4282 - protein, 24 aa, Artificial Sequence
  Synthetic
AENMLQLVSDFLTSASLISSTNIH

SEQ ID NO: 4283 - protein, 22 aa, Artificial Sequence
  Synthetic
SNFKDLVDSLLQVLNVKEGTPS

SEQ ID NO: 4284 - protein, 11 aa, Artificial Sequence
  Synthetic
INAVSALANHG

SEQ ID NO: 4285 - protein, 22 aa, Artificial Sequence
  Synthetic
ICKSFQSLVHRFGHVTVAPTSV

SEQ ID NO: 4286 - protein, 29 aa, Artificial Sequence
  Synthetic
KAGASSITDVGACTFLFFANTLMCLFYLS

SEQ ID NO: 4287 - protein, 30 aa, Artificial Sequence
  Synthetic
KFVSDVADYFWKMAKMSGKVIGNGIANQNE

SEQ ID NO: 4288 - protein, 30 aa, Artificial Sequence; identical to SEQ ID NO: 4287
  Synthetic

SEQ ID NO: 4289 - protein, 21 aa, Artificial Sequence
  Synthetic
SRLCQLMDKLIRNADNEASLK

SEQ ID NO: 4290 - protein, 17 aa, Artificial Sequence
  Synthetic
VENLANELNHLLTHARN

SEQ ID NO: 4291 - protein, 15 aa, Artificial Sequence
  Synthetic
SFYTILADCCRRPRG

SEQ ID NO: 4292 - protein, 15 aa, Artificial Sequence
  Synthetic
SYPQYMTSGYASNWN

SEQ ID NO: 4293 - protein, 15 aa, Artificial Sequence
  Synthetic
SYPQYMTSGYASNWN

SEQ ID NO: 4294 - protein, 20 aa, Artificial Sequence
  Synthetic
LAQYYSDLYQYITFITRPRF

SEQ ID NO: 4295 - protein, 18 aa, Artificial Sequence
  Synthetic
DSLKSFIEEAAKEVTTEA

SEQ ID NO: 4296 - protein, 24 aa, Artificial Sequence
  Synthetic
DLTDAMEDVLDIFEEGIIPQKKEL

SEQ ID NO: 4297 - protein, 15 aa, Artificial Sequence
  Synthetic
LFSNIGYVITDMLES

SEQ ID NO: 4298 - protein, 34 aa, Artificial Sequence
  Synthetic
KVAEKVADKIKEAAEVVKTVVADSDDAGQEHNEL

SEQ ID NO: 4299 - protein, 16 aa, Artificial Sequence
  Synthetic
NLFSNIGYVITDMLES

SEQ ID NO: 4300 - protein, 42 aa, Artificial Sequence
  Synthetic
KLWEGFKSIVGKRGLNDRDQLDDLFDSDLSDADIKLLKEMFK

SEQ ID NO: 4301 - protein, 30 aa, Artificial Sequence
  Synthetic
LRYIRGCAATCPGTKPRDMVECCSTDRCNR

SEQ ID NO: 4302 - protein, 30 aa, Artificial Sequence; identical to SEQ ID NO: 4301
  Synthetic

SEQ ID NO: 4303 - protein, 26 aa, Artificial Sequence
  Synthetic
NNLRKIADQACDNLTDNVNDFIPQEY

SEQ ID NO: 4304 - protein, 20 aa, Artificial Sequence
  Synthetic
SELLSIVRDIAESFWDCPYD

SEQ ID NO: 4305 - protein, 18 aa, Artificial Sequence
  Synthetic
CSRCCSYAGEAVQTQPGH

SEQ ID NO: 4306 - protein, 37 aa, Artificial Sequence
  Synthetic
STGVEKLRDIYDKSVDAVGTYTSILTDQLYHWWCGEQ

SEQ ID NO: 4307 - protein, 13 aa, Artificial Sequence
  Synthetic
KRLTKMGGDLNSP

SEQ ID NO: 4308 - protein, 41 aa, Artificial Sequence
  Synthetic
SLQDAGAGAGRRCICTTRTCRFPYRRLGTCIFQNRVYTFCC

SEQ ID NO: 4309 - protein, 41 aa, Artificial Sequence
  Synthetic
SLQDAGAGAGRRCICTTRTCRFPYRRLGTCLFQNRVYTFCC

SEQ ID NO: 4310 - protein, 11 aa, Artificial Sequence
  Synthetic
ISAVSALADHF

SEQ ID NO: 4311 - protein, 37 aa, Artificial Sequence
  Synthetic
LSSLQDYWSSFKGKWSGFGFWDATPEEASPTPAPEGI

SEQ ID NO: 4312 - protein, 34 aa, Artificial Sequence
  Synthetic
SDLCSLAKTAFSDCTAYVAGAELKACTLAQGKII

SEQ ID NO: 4313 - protein, 37 aa, Artificial Sequence
  Synthetic
YGGCGGNANNFSSYYECHIKCFGPRAIIFPEDSPKEN

SEQ ID NO: 4314 - protein, 22 aa, Artificial Sequence
  Synthetic
LMENIQDAFKDAVDSSDEHTLH

SEQ ID NO: 4315 - protein, 22 aa, Artificial Sequence
  Synthetic
LMENIQDAFKDAVDSSDEHTLH

SEQ ID NO: 4316 - protein, 30 aa, Artificial Sequence
  Synthetic
KFVSEVADYFWKMAKMSGKVIGNGIASQNE

SEQ ID NO: 4317 - protein, 33 aa, Artificial Sequence
  Synthetic
AAGGDRVFDAVVVVKAWLKSKELVSFTPASSTK

SEQ ID NO: 4318 - protein, 33 aa, Artificial Sequence; identical to SEQ ID NO: 4317
  Synthetic

SEQ ID NO: 4319 - protein, 39 aa, Artificial Sequence
  Synthetic
LLNQVTEIINDWQEKDDSQRKDIFDLKEKFPFVDFIGFD

SEQ ID NO: 4320 - protein, 25 aa, Artificial Sequence
  Synthetic
VLSAYWKDLNNYHRFSGMGFGPETP

SEQ ID NO: 4321 - protein, 32 aa, Artificial Sequence
  Synthetic
TPLKSGASSIIDAGACSFLFFANTLMCLFYLS

SEQ ID NO: 4322 - protein, 13 aa, Artificial Sequence
  Synthetic
KRLTKMGGDLNSP

SEQ ID NO: 4323 - protein, 35 aa, Artificial Sequence
  Synthetic
EVIDDIKEAVNQVCNGNVVSCADILVAAARDSVVE

SEQ ID NO: 4324 - protein, 28 aa, Artificial Sequence
  Synthetic
MIDECRKLMKSCDYFLLLDADMILKVHP

SEQ ID NO: 4325 - protein, 20 aa, Artificial Sequence
  Synthetic
NTALNAAKNFVAEKIGATPS

SEQ ID NO: 4326 - protein, 15 aa, Artificial Sequence
  Synthetic
DLSSVAKTLIHRLHK

SEQ ID NO: 4327 - protein, 26 aa, Artificial Sequence
  Synthetic
HAFEFMQRALQDLKKTAYNLDTRVRT

SEQ ID NO: 4328 - protein, 34 aa, Artificial Sequence
  Synthetic
HAFEFMQRALQDLKKTAYNLDTRVCVSIEMLLLR

SEQ ID NO: 4329 - protein, 13 aa, Artificial Sequence
  Synthetic
GKDLTDWVDGCDL

SEQ ID NO: 4330 - protein, 12 aa, Artificial Sequence
  Synthetic
FYGSYVGLGSSL

SEQ ID NO: 4331 - protein, 28 aa, Artificial Sequence
  Synthetic
QELSTLLEKVLNWISFFKILKRMWRDTK

SEQ ID NO: 4332 - protein, 24 aa, Artificial Sequence
  Synthetic
CAAHCLAIGRKGGSCQNGVCVCRN

SEQ ID NO: 4333 - protein, 41 aa, Artificial Sequence
  Synthetic
CEGWADAGCGLLELLDTSGAPEKRQHPGRRAELEDELPGLE

SEQ ID NO: 4334 - protein, 26 aa, Artificial Sequence
  Synthetic
IATFVTDIFQGAKYFRVKMDVKLYEC

SEQ ID NO: 4335 - protein, 26 aa, Artificial Sequence
  Synthetic
IATFVTDIFQGAKYFRVKMDVKLYEC

SEQ ID NO: 4336 - protein, 37 aa, Artificial Sequence
  Synthetic
TFMGCLKNCADVKGIRWSVYLVNFRCCRSHDLCNEDL

SEQ ID NO: 4337 - protein, 29 aa, Artificial Sequence
  Synthetic
HRCHRGGNGGYGGGSGEVVVIGAEKPKDK

SEQ ID NO: 4338 - protein, 31 aa, Artificial Sequence
  Synthetic
CAKVKGICKTFCDDDEYDYGYCIKWRNQCCI

SEQ ID NO: 4339 - protein, 24 aa, Artificial Sequence
  Synthetic
ATFGKQICGKCEQESTELHCHCRR

SEQ ID NO: 4340 - protein, 26 aa, Artificial Sequence
  Synthetic
AAFDAIGTRFNDEAQKQLAHHGLPHT

SEQ ID NO: 4341 - protein, 36 aa, Artificial Sequence
  Synthetic
NTALNAAKNLVAEKIGATPSEAGQMPFDEFMDILYE

SEQ ID NO: 4342 - protein, 36 aa, Artificial Sequence
  Synthetic
CYDCFREGLTKVYSYCCHKYNHMYEWCLEYFSGEMK

SEQ ID NO: 4343 - protein, 24 aa, Artificial Sequence
  Synthetic
ILNAFGQAMTAMGNAVSRYYCDAE

SEQ ID NO: 4344 - protein, 26 aa, Artificial Sequence
  Synthetic
IATFVTDIFQGAKYFRVKMDVKLYEC

SEQ ID NO: 4345 - protein, 27 aa, Artificial Sequence
  Synthetic
SWGDNVAAAWEHALENTYTVAFEVIPA

SEQ ID NO: 4346 - protein, 29 aa, Artificial Sequence
  Synthetic
SLADQAANEWGRSGKDPNHFRPAGLPEKY

SEQ ID NO: 4347 - protein, 30 aa, Artificial Sequence
  Synthetic
KFVKDVADYFWEMAKISGQVVSNGIANQNE

SEQ ID NO: 4348 - protein, 27 aa, Artificial Sequence
  Synthetic
YLKSLYGGYGNGNGEFREEYIDERYDN

SEQ ID NO: 4349 - protein, 30 aa, Artificial Sequence
  Synthetic
KVGGLLGTLAEELNGYSRKKGGFSFRFGRR

SEQ ID NO: 4350 - protein, 25 aa, Artificial Sequence
  Synthetic
LRTVAELLNKVADAAEKKENIDFFN

SEQ ID NO: 4351 - protein, 41 aa, Artificial Sequence
  Synthetic
ISAIANQVKNGKNAMPSFSRLSDSDIEDVANYVLSKADKGW

SEQ ID NO: 4352 - protein, 17 aa, Artificial Sequence
  Synthetic
KCCKNGCGFMTCTTARP

SEQ ID NO: 4353 - protein, 27 aa, Artificial Sequence
  Synthetic
SGYNGVGKCFDDPKVPGRSNCGCLYNC

SEQ ID NO: 4354 - protein, 11 aa, Artificial Sequence
  Synthetic
YTAVADCCHQA

SEQ ID NO: 4355 - protein, 26 aa, Artificial Sequence
  Synthetic
AIWSGFKNWVNTDCASHNPFVCKSPA

SEQ ID NO: 4356 - protein, 12 aa, Artificial Sequence
  Synthetic
EYLENWVKEFED

SEQ ID NO: 4357 - protein, 17 aa, Artificial Sequence
  Synthetic
GQHAGGKCINGKCKCYP

SEQ ID NO: 4358 - protein, 17 aa, Artificial Sequence
  Synthetic
GQHAGGKCINGKCKCYP

SEQ ID NO: 4359 - protein, 37 aa, Artificial Sequence
  Synthetic
HRLAGLLSSAGSMANSNLLPTEMGFKVSGRRRRDLQA

SEQ ID NO: 4360 - protein, 26 aa, Artificial Sequence
  Synthetic
IATFVTDIFQGAKYFRVKMDIKLYEC

SEQ ID NO: 4361 - protein, 30 aa, Artificial Sequence; identical to SEQ ID NO: 4301
  Synthetic

SEQ ID NO: 4362 - protein, 30 aa, Artificial Sequence
  Synthetic
LRYIRGCAATCPGTKPRDMVECCNTDRCNR

SEQ ID NO: 4363 - protein, 32 aa, Artificial Sequence
  Synthetic
RKLETVVNEIVDEMNYLKRRETKLRDTNGKLL

SEQ ID NO: 4364 - protein, 24 aa, Artificial Sequence
  Synthetic
FCQACWRFAGTCGPYVGRAMAIGV

SEQ ID NO: 4365 - protein, 30 aa, Artificial Sequence; identical to SEQ ID NO: 4301
  Synthetic

SEQ ID NO: 4366 - protein, 28 aa, Artificial Sequence
  Synthetic
ASSIFKTLRTIANDDCELCVNVACTGCL

SEQ ID NO: 4367 - protein, 28 aa, Artificial Sequence
  Synthetic
ASSIFKTLRTIANDDCELCVNVACTGCL

SEQ ID NO: 4368 - protein, 28 aa, Artificial Sequence
  Synthetic
ASSIFKTLRTIANDDCELCVNVACTGCL

SEQ ID NO: 4369 - protein, 29 aa, Artificial Sequence
  Synthetic
AQEILQRLEEIAEDPSTCEICAYAACTGC

SEQ ID NO: 4370 - protein, 34 aa, Artificial Sequence
  Synthetic
NFNGILENGGTTLSKKTVLLLVTPFLAAAWSLHP

SEQ ID NO: 4371 - protein, 23 aa, Artificial Sequence
  Synthetic
HAFEFMQRALQDLKKTAYNLDTR

SEQ ID NO: 4372 - protein, 23 aa, Artificial Sequence
  Synthetic
HAFEFMQRALQDLKKTAYNLDTR

SEQ ID NO: 4373 - protein, 23 aa, Artificial Sequence
  Synthetic
HAFEFMQRALQDLKKTAYNLDTR

SEQ ID NO: 4374 - protein, 23 aa, Artificial Sequence
  Synthetic
HAFEFMQRALQDLKKTAYNLDTR

SEQ ID NO: 4375 - protein, 23 aa, Artificial Sequence
  Synthetic
HAFEFMQRALQDLKKTAYNLDTR

SEQ ID NO: 4376 - protein, 23 aa, Artificial Sequence
  Synthetic
HAFEFMQRALQDLKKTAYNLDTR

SEQ ID NO: 4377 - protein, 23 aa, Artificial Sequence
  Synthetic
HAFEFMQRALQDLKKTAYNLDTR

SEQ ID NO: 4378 - protein, 23 aa, Artificial Sequence
  Synthetic
HAFEFMQRALQDLKKTAYNLDMR

SEQ ID NO: 4379 - protein, 23 aa, Artificial Sequence
  Synthetic
HAFEFMQRALQDLKKTAYNLDAR

SEQ ID NO: 4380 - protein, 35 aa, Artificial Sequence
  Synthetic
GKQLGKQFRRGCAATCPEGKPNEIVQCCSTDECNH

SEQ ID NO: 4381 - protein, 21 aa, Artificial Sequence
  Synthetic
DPVNEICTSASNLCHTIRDEL

SEQ ID NO: 4382 - protein, 30 aa, Artificial Sequence
  Synthetic
AKEVEDLVSEIADELGDDVDDDAQTPEKTK

SEQ ID NO: 4383 - protein, 30 aa, Artificial Sequence
  Synthetic
CSKCFYTCAEKMKYCAKTCGFCTKGACKDC

SEQ ID NO: 4384 - protein, 19 aa, Artificial Sequence
  Synthetic
AITEMAECCSGFCLIYRCS

SEQ ID NO: 4385 - protein, 41 aa, Artificial Sequence
  Synthetic
SLEDAGAGAGRRCICTTRTCRFPYRRLGTCIFQNRVYTFCC

SEQ ID NO: 4386 - protein, 15 aa, Artificial Sequence
  Synthetic
LPHLASGLASLVLSK

SEQ ID NO: 4387 - protein, 13 aa, Artificial Sequence
  Synthetic
KRLTKMGGDLNSP

SEQ ID NO: 4388 - protein, 15 aa, Artificial Sequence
  Synthetic
DIRHALQNLLSTISQ

SEQ ID NO: 4389 - protein, 25 aa, Artificial Sequence
  Synthetic
VQRAIQIASSIIDEIEEFGRRVESC

SEQ ID NO: 4390 - protein, 24 aa, Artificial Sequence
  Synthetic
EAMNLLTYMLHGLSRRHNILRWLK

SEQ ID NO: 4391 - protein, 34 aa, Artificial Sequence
  Synthetic
REALEEFKKLVQRKGLSEEDIFTPLQTGSCVPEH

SEQ ID NO: 4392 - protein, 21 aa, Artificial Sequence
  Synthetic
QSIADTIKDAFDKAQAVFADA

SEQ ID NO: 4393 - protein, 32 aa, Artificial Sequence
  Synthetic
NEVMEKFNRALKTLPVHMQLLNPTQAEEQCLI

SEQ ID NO: 4394 - protein, 28 aa, Artificial Sequence
  Synthetic
ASSIFKTLRTIANDDCELCVNVACTGCL

SEQ ID NO: 4395 - protein, 33 aa, Artificial Sequence
  Synthetic
TRIYQIAKNLPNVCNMKQIGTCPFIAIPFFPPY

SEQ ID NO: 4396 - protein, 33 aa, Artificial Sequence; identical to SEQ ID NO: 4395
  Synthetic

SEQ ID NO: 4397 - protein, 33 aa, Artificial Sequence; identical to SEQ ID NO: 4395
  Synthetic

SEQ ID NO: 4398 - protein, 23 aa, Artificial Sequence
  Synthetic
DYGNSYFGYFDVWGAGTTVTVSS

SEQ ID NO: 4399 - protein, 26 aa, Artificial Sequence
  Synthetic
AFDFLTHVLHLVSDADAEHHLLQSDE

SEQ ID NO: 4400 - protein, 15 aa, Artificial Sequence
  Synthetic
CQSVAASCARSCGSC

SEQ ID NO: 4401 - protein, 17 aa, Artificial Sequence
  Synthetic
CGDAHHFYRGCTCSCQG

SEQ ID NO: 4402 - protein, 23 aa, Artificial Sequence
  Synthetic
HAFEFMQRALQDLKKTAYNLDTR

SEQ ID NO: 4403 - protein, 23 aa, Artificial Sequence
  Synthetic
HAFEFMQRALQDLKKTAYNLDTR

SEQ ID NO: 4404 - protein, 23 aa, Artificial Sequence
  Synthetic
HAFEFMQRALQDLKKTAYNLDTR

SEQ ID NO: 4405 - protein, 23 aa, Artificial Sequence
  Synthetic
HAFEFMQRALQDLKKTAYNLDTR

SEQ ID NO: 4406 - protein, 23 aa, Artificial Sequence
  Synthetic
HAFEFMQRALQDLKKTAYNLDTR

SEQ ID NO: 4407 - protein, 23 aa, Artificial Sequence
  Synthetic
HAFEFMQRALQDLKKTAYNLDTR

SEQ ID NO: 4408 - protein, 23 aa, Artificial Sequence
  Synthetic
HAFEFMQRALQDLKKTAYNLDTR

SEQ ID NO: 4409 - protein, 23 aa, Artificial Sequence
  Synthetic
HAFEFMQRALQDLKKTAYNLDTR

SEQ ID NO: 4410 - protein, 35 aa, Artificial Sequence
  Synthetic
LRDLRDAFSRVKTFFQMKDQLDNLLLKESLLEDFK

SEQ ID NO: 4411 - protein, 26 aa, Artificial Sequence
  Synthetic
SWGDNVAAAWNHALDNTYAVALKSLE

SEQ ID NO: 4412 - protein, 26 aa, Artificial Sequence
  Synthetic
SWGDNVAAAWNHALDNTYAVALKSLE

SEQ ID NO: 4413 - protein, 34 aa, Artificial Sequence
  Synthetic
NTCSTFVHGGCQGNNNNFQSEANCLNTCKNKRFP

SEQ ID NO: 4414 - protein, 42 aa, Artificial Sequence
  Synthetic
CIDECKEIGAGYGYCYGFGCYCEGFPENKPTWPLPNKTCGRK

SEQ ID NO: 4415 - protein, 24 aa, Artificial Sequence
  Synthetic
KRLLEGIEKIISQAYPEAKGNEIY

SEQ ID NO: 4416 - protein, 34 aa, Artificial Sequence
  Synthetic
KIAEKVAEKVAEAANVVKTIVQDTDSDAQEHNEL

SEQ ID NO: 4417 - protein, 12 aa, Artificial Sequence
  Synthetic
LQDAYQRFYGPV

SEQ ID NO: 4418 - protein, 42 aa, Artificial Sequence
  Synthetic
CYGAAGTCARVVCDCDRTAALCFGDSEYIEGHKNIDTARFCQ

SEQ ID NO: 4419 - protein, 39 aa, Artificial Sequence
  Synthetic
QDMREAGAQLKKLVDTLPQKPRESIIKLMEKIAQSSLCN

SEQ ID NO: 4420 - protein, 42 aa, Artificial Sequence
  Synthetic
GGGGGGGGGGSRRLKGLPKKGLGSGCFGLKLDRIGSMSGLGC

SEQ ID NO: 4421 - protein, 15 aa, Artificial Sequence
  Synthetic
SVAGVAKKGYRKSSY

SEQ ID NO: 4422 - protein, 25 aa, Artificial Sequence
  Synthetic
EYYNNGGGLYSKDAKKELKDPSTSA

SEQ ID NO: 4423 - protein, 34 aa, Artificial Sequence
  Synthetic
LSRYAKLANRLANPKLLETFLSKWIGDRGNRSVK

SEQ ID NO: 4424 - protein, 24 aa, Artificial Sequence
  Synthetic
CAAHCLAIGRKGGACQNGVCVCRR

SEQ ID NO: 4425 - protein, 30 aa, Artificial Sequence
  Synthetic
MTSAVDFINEVIKHFQANPMAGRKIRSDEL

SEQ ID NO: 4426 - protein, 36 aa, Artificial Sequence
  Synthetic
ECDRVAANCFAENLKTYNKKYWLSSIIDCKEESEKC

SEQ ID NO: 4427 - protein, 21 aa, Artificial Sequence
  Synthetic
GVVDQCCTSICSLYQLQNYCN

SEQ ID NO: 4428 - protein, 24 aa, Artificial Sequence
  Synthetic
AVEQCTKACSTLCTKGSMTAVEAT

SEQ ID NO: 4429 - protein, 31 aa, Artificial Sequence
  Synthetic
NKGMEEFKKIVRTLTIPYTMIEAQTREMCRV

SEQ ID NO: 4430 - protein, 34 aa, Artificial Sequence; identical to SEQ ID NO: 4298
  Synthetic

SEQ ID NO: 4431 - protein, 34 aa, Artificial Sequence; identical to SEQ ID NO: 4298
  Synthetic

SEQ ID NO: 4432 - protein, 33 aa, Artificial Sequence
  Synthetic
SGYCQWVGKYGNGCWCIELPDNVPIRVPGKCHR

SEQ ID NO: 4433 - protein, 38 aa, Artificial Sequence
  Synthetic
DKAREVINRIKQSEFPAKTRDWFSETFRKVKEKLKINS

SEQ ID NO: 4434 - protein, 24 aa, Artificial Sequence
  Synthetic
AVERCTKACSTICTKGSKTAVETV

SEQ ID NO: 4435 - protein, 39 aa, Artificial Sequence
  Synthetic
DIATRCGGTGDSCNEPAGELCCRRLKCVNSRCCPTTDGC

SEQ ID NO: 4436 - protein, 22 aa, Artificial Sequence
  Synthetic
CGRAWSEGSKVCFICNRESSMC

SEQ ID NO: 4437 - protein, 17 aa, Artificial Sequence
  Synthetic
NKFLTILDQLINKIIVN

SEQ ID NO: 4438 - protein, 24 aa, Artificial Sequence
  Synthetic
AVDRCANACSTVCTKDSMNAVETA

SEQ ID NO: 4439 - protein, 22 aa, Artificial Sequence
  Synthetic
LMQKIQDAVKDALDSSDEHTLH

SEQ ID NO: 4440 - protein, 16 aa, Artificial Sequence
  Synthetic
NILNQIREVVSSALSG

SEQ ID NO: 4441 - protein, 26 aa, Artificial Sequence
  Synthetic
AAKTAADALAAAKKTAADAAAAAAKP

SEQ ID NO: 4442 - protein, 42 aa, Artificial Sequence
  Synthetic
LQNAGTQLKRLVDTLPQETRINIVKLTEKILTSPLCEQDLRV

SEQ ID NO: 4443 - protein, 38 aa, Artificial Sequence
  Synthetic
VGPCDQVCSRIDPEKDECCRAHGYRGHSSCYYGRMECY

SEQ ID NO: 4444 - protein, 20 aa, Artificial Sequence
  Synthetic
RLKGYLRAYCSQQKVCRCVQ

SEQ ID NO: 4445 - protein, 40 aa, Artificial Sequence
  Synthetic
SNIVRTIMEFLSFLHLKEAGALDSLPGIPLATSSEDLEQS

SEQ ID NO: 4446 - protein, 40 aa, Artificial Sequence
  Synthetic
SNIVRTIMEFLSFLHLKEAGALDSLPGIPLATSSEDLEKS

SEQ ID NO: 4447 - protein, 11 aa, Artificial Sequence
  Synthetic
DFTGIADSIIK

SEQ ID NO: 4448 - protein, 17 aa, Artificial Sequence
  Synthetic
DSILKLMDKIAKSPLCA

SEQ ID NO: 4449 - protein, 21 aa, Artificial Sequence
  Synthetic
RSFRNGVGTGMKKTSFQRAKS

SEQ ID NO: 4450 - protein, 11 aa, Artificial Sequence
  Synthetic
LSAALATWFSF

SEQ ID NO: 4451 - protein, 27 aa, Artificial Sequence
  Synthetic
QVGQILRECAKNLKNESTAEAFPGDEV

SEQ ID NO: 4452 - protein, 38 aa, Artificial Sequence
  Synthetic
ADCVGDGQKCADWFGPYCCSGYYCSCRSMPYCRCRSDS

SEQ ID NO: 4453 - protein, 32 aa, Artificial Sequence
  Synthetic
SYALTWIDECIRTCSRRGYTFAGTGVWFYISL

SEQ ID NO: 4454 - protein, 13 aa, Artificial Sequence
  Synthetic
LAGVLAVGAALVI

SEQ ID NO: 4455 - protein, 18 aa, Artificial Sequence
  Synthetic
KNVVEDIKKILQKMWPWK

SEQ ID NO: 4456 - protein, 11 aa, Artificial Sequence
  Synthetic
LSAALATWLSF

SEQ ID NO: 4457 - protein, 11 aa, Artificial Sequence
  Synthetic
LSAALATWLSF

SEQ ID NO: 4458 - protein, 11 aa, Artificial Sequence
  Synthetic
LSAALATWLSF

SEQ ID NO: 4459 - protein, 34 aa, Artificial Sequence
  Synthetic
ANKANRMMRKIMRKLPPDTLEELFQIYKKTRDQK

SEQ ID NO: 4460 - protein, 33 aa, Artificial Sequence
  Synthetic
RARDFVDDAVKEWEYDLTEVTNRNAPHCRPNCC

SEQ ID NO: 4461 - protein, 23 aa, Artificial Sequence
  Synthetic
GQPLGKFLQDILWEEVTEAPADK

SEQ ID NO: 4462 - protein, 42 aa, Artificial Sequence
  Synthetic
KLWEGVKSAIGKRSLRNQDQFDNMFDSDLSDADLKLLDDLFD

SEQ ID NO: 4463 - protein, 13 aa, Artificial Sequence
  Synthetic
KRLTKMGGDLNSP

SEQ ID NO: 4464 - protein, 11 aa, Artificial Sequence
  Synthetic
GHGGASNYVRL

SEQ ID NO: 4465 - protein, 32 aa, Artificial Sequence
  Synthetic
KVPEALQSVAQGLTQGIDDSFSEGIAVYEQFL

SEQ ID NO: 4466 - protein, 23 aa, Artificial Sequence
  Synthetic
CQDMLGTFKGWHFCTCYSGRPGC

SEQ ID NO: 4467 - protein, 22 aa, Artificial Sequence
  Synthetic
TDYCSRIFAIFNCLRQEILTKS

SEQ ID NO: 4468 - protein, 29 aa, Artificial Sequence
  Synthetic
AQEILQRLEEIAEDPGTCEICAYAACTGC

SEQ ID NO: 4469 - protein, 27 aa, Artificial Sequence
  Synthetic
QQVLTEIDDAFNNAIAAYGGKYMTEKN

SEQ ID NO: 4470 - protein, 11 aa, Artificial Sequence
  Synthetic
EWINGGLEWAE

SEQ ID NO: 4471 - protein, 34 aa, Artificial Sequence
  Synthetic
SGYCQWFGRYGNACWCIKLPDKVPIKVPGKCNGR

SEQ ID NO: 4472 - protein, 15 aa, Artificial Sequence
  Synthetic
SYYTVIADCCRKPRG

SEQ ID NO: 4473 - protein, 21 aa, Artificial Sequence
  Synthetic
AVQKYLAAVLGRRYRQRVRNK

SEQ ID NO: 4474 - protein, 33 aa, Artificial Sequence
  Synthetic
KIAEKVASKVAEAADVLKTIVVDSDDGQEHNEL

SEQ ID NO: 4475 - protein, 42 aa, Artificial Sequence
  Synthetic
NKASGFIATLCTKVLDFGIDKLIQLIEDKVDANAICAKIHAC

SEQ ID NO: 4476 - protein, 25 aa, Artificial Sequence
  Synthetic
GGWKGGGGGGGGWKGGGGGGKGGGG

SEQ ID NO: 4477 - protein, 21 aa, Artificial Sequence
  Synthetic
GIVDQCCTSICSLYQLENYCN

SEQ ID NO: 4478 - protein, 21 aa, Artificial Sequence
  Synthetic
GIVDQCCTSICSLYQLENYCN

SEQ ID NO: 4479 - protein, 21 aa, Artificial Sequence
  Synthetic
GIVDQCCTSICSLYQLENYCN

SEQ ID NO: 4480 - protein, 13 aa, Artificial Sequence
  Synthetic
GFQEAYRRFYGTT

SEQ ID NO: 4481 - protein, 28 aa, Artificial Sequence
  Synthetic
KFADYVDDCLNRAFSFSAASTGNSVLSL

SEQ ID NO: 4482 - protein, 24 aa, Artificial Sequence
  Synthetic
LEKGVQIARQCFCSEKDVIYKKDI

SEQ ID NO: 4483 - protein, 28 aa, Artificial Sequence
  Synthetic
MIDECRKLMKSCDYFLLLDADMILKVHP

SEQ ID NO: 4484 - protein, 38 aa, Artificial Sequence
  Synthetic
ELLRRLRDIFAAKRNFTRHQQQKATREPESSHSRWRKR

SEQ ID NO: 4485 - protein, 17 aa, Artificial Sequence
  Synthetic
ILDVITDAVNSAMNAMG

SEQ ID NO: 4486 - protein, 23 aa, Artificial Sequence
  Synthetic
EAFSEVIESAPEAKTDQVTSTVV

SEQ ID NO: 4487 - protein, 19 aa, Artificial Sequence
  Synthetic
YGSSYFDYWGQGTTLTVSS

SEQ ID NO: 4488 - protein, 42 aa, Artificial Sequence
  Synthetic
NKASGFIATLCTKVLDFGVDKLIQLIEDKVDANAICAKIHAC

SEQ ID NO: 4489 - protein, 18 aa, Artificial Sequence
  Synthetic
NVLSSVANGINRALSFFG

SEQ ID NO: 4490 - protein, 12 aa, Artificial Sequence
  Synthetic
EYLENWAKEFED

SEQ ID NO: 4491 - protein, 33 aa, Artificial Sequence
  Synthetic
YCLNIASTIVSLLTTALIMVFTSATYFLYSVSH

SEQ ID NO: 4492 - protein, 26 aa, Artificial Sequence
  Synthetic
YAQCTACCKKAGHNKGTCDFFKCKCT

SEQ ID NO: 4493 - protein, 27 aa, Artificial Sequence
  Synthetic
YLKSLYGGYGNGNGEFWEEYIDERYDK

SEQ ID NO: 4494 - protein, 12 aa, Artificial Sequence
  Synthetic
CSTVEKLMKRGS

SEQ ID NO: 4495 - protein, 21 aa, Artificial Sequence
  Synthetic
LRALKGALESLIEEETGQKKI

SEQ ID NO: 4496 - protein, 25 aa, Artificial Sequence
  Synthetic
LSVLDKILENIGQSEGSLELTESIF

SEQ ID NO: 4497 - protein, 25 aa, Artificial Sequence
  Synthetic
WLAGCPSGWHNCKSSGPLIGACCKQ

SEQ ID NO: 4498 - protein, 20 aa, Artificial Sequence
  Synthetic
EIESAVTELVRNVHEQIPDL

SEQ ID NO: 4499 - protein, 32 aa, Artificial Sequence
  Synthetic
KASDLMARVLEKDCPPHPVPGMHKCVCLKTCR

SEQ ID NO: 4500 - protein, 33 aa, Artificial Sequence
  Synthetic
KQVMEKFSDAVNTLSVRMPIFLDVTQGAERCRI

SEQ ID NO: 4501 - protein, 11 aa, Artificial Sequence
  Synthetic
GAPRVLNNAGR

SEQ ID NO: 4502 - protein, 21 aa, Artificial Sequence
  Synthetic
NCDKVAAECFARNTYHPNNKH

SEQ ID NO: 4503 - protein, 15 aa, Artificial Sequence
  Synthetic
CQSVAAACARSCGGC

SEQ ID NO: 4504 - protein, 27 aa, Artificial Sequence
  Synthetic
RKANNLADTLARQARINNSPMVVSWIN

SEQ ID NO: 4505 - protein, 15 aa, Artificial Sequence
  Synthetic
LLREASYILENLEHL

SEQ ID NO: 4506 - protein, 15 aa, Artificial Sequence
  Synthetic
KNADELMNEAITHLK

SEQ ID NO: 4507 - protein, 35 aa, Artificial Sequence
  Synthetic
YFKNCVKNILKDCQTSKIPFDNCRDNLHIDFTKQQ

SEQ ID NO: 4508 - protein, 33 aa, Artificial Sequence
  Synthetic
NILSSIMGSLGTIGNVVGNVCCSITKSCCASEE

SEQ ID NO: 4509 - protein, 33 aa, Artificial Sequence; identical to SEQ ID NO: 4508
  Synthetic

SEQ ID NO: 4510 - protein, 35 aa, Artificial Sequence
  Synthetic
ITAVVDVIRELGICPDDWAVIPIKANRFSITKSLP

SEQ ID NO: 4511 - protein, 21 aa, Artificial Sequence
  Synthetic
GMAALMEELRGLGQGIQGQQY

SEQ ID NO: 4512 - protein, 22 aa, Artificial Sequence
  Synthetic
AAAESAWTAGLDNIFGLLFAAL

SEQ ID NO: 4513 - protein, 34 aa, Artificial Sequence
  Synthetic
ENIVRTVVEFLTYLHLKEAGALDNLPSPEETNES

SEQ ID NO: 4514 - protein, 26 aa, Artificial Sequence
  Synthetic
GNYIDNVYGDLEEQKPDFDSKLELPN

SEQ ID NO: 4515 - protein, 22 aa, Artificial Sequence
  Synthetic
QQIFNFATSLIRTIYAKLTSFF

SEQ ID NO: 4516 - protein, 38 aa, Artificial Sequence
  Synthetic
GCTTCCTGYKGCYYFGKDGKFVCEGESDEPKANMYPVM

SEQ ID NO: 4517 - protein, 40 aa, Artificial Sequence
  Synthetic
AGILTMGRRAGAELEPYPCPGRRCPTATATALAPRGGSRV

SEQ ID NO: 4518 - protein, 14 aa, Artificial Sequence
  Synthetic
EWVQKYVSDLELSA

SEQ ID NO: 4519 - protein, 35 aa, Artificial Sequence
  Synthetic
RTFRSCARTAFRTAKLRRGEKVGATSADAESDETR

SEQ ID NO: 4520 - protein, 17 aa, Artificial Sequence
  Synthetic
GYNAAYNRYFRKRRGAE

SEQ ID NO: 4521 - protein, 36 aa, Artificial Sequence
  Synthetic
ECDRVATTCFRDNKDTYDIKYWFYGAKNCQEKSEPC

SEQ ID NO: 4522 - protein, 31 aa, Artificial Sequence
  Synthetic
VCNGCGDQVAACEAECFRNDVYTACHEAQKG

SEQ ID NO: 4523 - protein, 29 aa, Artificial Sequence
  Synthetic
ASSCFNNVNDVLRRDVEVVEYLNDLMDTF

SEQ ID NO: 4524 - protein, 23 aa, Artificial Sequence
  Synthetic
HAFEFMQRALQDLKKTACNLDTR

SEQ ID NO: 4525 - protein, 21 aa, Artificial Sequence
  Synthetic
QLAQYYSDLYQYITFVTRPRF

SEQ ID NO: 4526 - protein, 36 aa, Artificial Sequence
  Synthetic
NEGPKWANTYCAAVCHMSGRGAGSCNAKDECVCSMT

SEQ ID NO: 4527 - protein, 21 aa, Artificial Sequence
  Synthetic
GIVEQCCTGICSLYQLENYCN

SEQ ID NO: 4528 - protein, 15 aa, Artificial Sequence
  Synthetic
IAAAKAAGQAALGAL

SEQ ID NO: 4529 - protein, 15 aa, Artificial Sequence
  Synthetic
IAAAKAAGQAALGAL

SEQ ID NO: 4530 - protein, 15 aa, Artificial Sequence
  Synthetic
IAAAKAAGQAALGAL

SEQ ID NO: 4531 - protein, 15 aa, Artificial Sequence
  Synthetic
VLSLMSTWFTQLLRV

SEQ ID NO: 4532 - protein, 25 aa, Artificial Sequence
  Synthetic
AGHDLSEWLKGCSVRLKTDSSYNNW

SEQ ID NO: 4533 - protein, 25 aa, Artificial Sequence
  Synthetic
RSVLTALERAFDEMKSDPNAMALVT

SEQ ID NO: 4534 - protein, 21 aa, Artificial Sequence
  Synthetic
GIVEQCCTSICSLYQLENYCN

SEQ ID NO: 4535 - protein, 21 aa, Artificial Sequence
  Synthetic
GIVEQCCTSICSLYQLENYCN

SEQ ID NO: 4536 - protein, 21 aa, Artificial Sequence
  Synthetic
GIVEQCCTSICSLYQLENYCN

SEQ ID NO: 4537 - protein, 21 aa, Artificial Sequence
  Synthetic
GIVEQCCTSICSLYQLENYCN

SEQ ID NO: 4538 - protein, 21 aa, Artificial Sequence
  Synthetic
GIVEQCCTSICSLYQLENYCN

SEQ ID NO: 4539 - protein, 21 aa, Artificial Sequence
  Synthetic
GIVEQCCTSICSLYQLENYCN

SEQ ID NO: 4540 - protein, 21 aa, Artificial Sequence
  Synthetic
GIVEQCCTSICSLYQLENYCN

SEQ ID NO: 4541 - protein, 21 aa, Artificial Sequence
  Synthetic
GIVEQCCTSICSLYQLENYCN

SEQ ID NO: 4542 - protein, 21 aa, Artificial Sequence
  Synthetic
GIVEQCCTSICSLYQLENYCN

SEQ ID NO: 4543 - protein, 21 aa, Artificial Sequence
  Synthetic
GIVEQCCTSICSLYQLENYCN

SEQ ID NO: 4544 - protein, 29 aa, Artificial Sequence
  Synthetic
AQEILQRLEEIADDPGTCEICAYAACTGC

SEQ ID NO: 4545 - protein, 12 aa, Artificial Sequence
  Synthetic
VAASCARSCGGC

SEQ ID NO: 4546 - protein, 24 aa, Artificial Sequence
  Synthetic
WFDRMKQFIEDFLHCFTPLHDIDL

SEQ ID NO: 4547 - protein, 22 aa, Artificial Sequence
  Synthetic
LEKYRAALEGLLSEMLPQHAAK

SEQ ID NO: 4548 - protein, 13 aa, Artificial Sequence
  Synthetic
KRLTKMGGDLNSP

SEQ ID NO: 4549 - protein, 28 aa, Artificial Sequence
  Synthetic
GLWSKIKDVAAAAGKAALGAVNEALGEQ

SEQ ID NO: 4550 - protein, 21 aa, Artificial Sequence
  Synthetic
NVTSFLYDALDTLNDPTTTSL

SEQ ID NO: 4551 - protein, 35 aa, Artificial Sequence
  Synthetic
SDAAKEVEDLASEIADELGDDVDVDDDAQTTEKTE

SEQ ID NO: 4552 - protein, 17 aa, Artificial Sequence
  Synthetic
GGDCIGGLDGIYCCCLA

SEQ ID NO: 4553 - protein, 19 aa, Artificial Sequence
  Synthetic
SLGESLESGISKRISINQD

SEQ ID NO: 4554 - protein, 30 aa, Artificial Sequence
  Synthetic
ASSCFNNVNDILRQDVEVVEYLNDLMDTFR

SEQ ID NO: 4555 - protein, 40 aa, Artificial Sequence
  Synthetic
EAVADAWHWLNLRPGQPMYKREANADAWHWLQLKPGQPMY

SEQ ID NO: 4556 - protein, 42 aa, Artificial Sequence
  Synthetic
CLKSAANAIKGIDLNKAAGIPSVCKVNIPYKISPSTDCSTVQ

SEQ ID NO: 4557 - protein, 42 aa, Artificial Sequence; identical to SEQ ID NO: 4556
  Synthetic

SEQ ID NO: 4558 - protein, 16 aa, Artificial Sequence
  Synthetic
GNTYCGHFHGYIPSCL

SEQ ID NO: 4559 - protein, 31 aa, Artificial Sequence
  Synthetic
VCNNCGDQVAACEAECFRNDVYTACHEAQKG

SEQ ID NO: 4560 - protein, 19 aa, Artificial Sequence
  Synthetic
RIRKYFTGYCSGDTCHCSG

SEQ ID NO: 4561 - protein, 25 aa, Artificial Sequence
  Synthetic
KGFLSGLLNVAGSVCCKVDTSCCSN

SEQ ID NO: 4562 - protein, 26 aa, Artificial Sequence
  Synthetic
KGFLSGLLNVAGSVCCKVDTSCCSSQ

SEQ ID NO: 4563 - protein, 25 aa, Artificial Sequence
  Synthetic
KGFLSGLLNVAGSVCCKVDTSCCSN

SEQ ID NO: 4564 - protein, 23 aa, Artificial Sequence
  Synthetic
KGFLSGLLNVAGSVCCKVDTSCC

SEQ ID NO: 4565 - protein, 26 aa, Artificial Sequence
  Synthetic
KGFLSGLLNVAGSVCCKVDTSCCSNQ

SEQ ID NO: 4566 - protein, 16 aa, Artificial Sequence
  Synthetic
ENLIDELNQALKDLGL

SEQ ID NO: 4567 - protein, 22 aa, Artificial Sequence
  Synthetic
YCVHSMIDDVDYAVCKKIRVLI

SEQ ID NO: 4568 - protein, 33 aa, Artificial Sequence
  Synthetic
KIAEKIASKVGEAADVVKTLIQDTDDVQEHNEL

SEQ ID NO: 4569 - protein, 14 aa, Artificial Sequence
  Synthetic
LLDVVGNVLHSLGL

SEQ ID NO: 4570 - protein, 29 aa, Artificial Sequence
  Synthetic
ENCRTIIDNLMTLARSFAFSLPYSDYIFY

SEQ ID NO: 4571 - protein, 13 aa, Artificial Sequence
  Synthetic
SCLEYGHSCWGAH

SEQ ID NO: 4572 - protein, 11 aa, Artificial Sequence
  Synthetic
EWLQGGLEWAE

SEQ ID NO: 4573 - protein, 18 aa, Artificial Sequence
  Synthetic
ATGFFEELGSKLAGLFTG

SEQ ID NO: 4574 - protein, 17 aa, Artificial Sequence
  Synthetic
FTNCVKDLEEAEKEPPE

SEQ ID NO: 4575 - protein, 32 aa, Artificial Sequence
  Synthetic
KDAANKAKDAANKAKDAVVDKTQDFMKSEKLN

SEQ ID NO: 4576 - protein, 18 aa, Artificial Sequence
  Synthetic
QMEALVQKLMEKTRSISN

SEQ ID NO: 4577 - protein, 33 aa, Artificial Sequence
  Synthetic
KVVEKVASVAKQAAEVVETIIADTDDTQEHNEL

SEQ ID NO: 4578 - protein, 33 aa, Artificial Sequence; identical to SEQ ID NO: 4577
  Synthetic

SEQ ID NO: 4579 - protein, 33 aa, Artificial Sequence; identical to SEQ ID NO: 4577
  Synthetic

SEQ ID NO: 4580 - protein, 33 aa, Artificial Sequence
  Synthetic
NIVDKMASKVAEAAEVVKTIVVDTDDGQEHNEL

SEQ ID NO: 4581 - protein, 23 aa, Artificial Sequence
  Synthetic
CERFSNALENLDKLLGVGAGEQF

SEQ ID NO: 4582 - protein, 29 aa, Artificial Sequence
  Synthetic
AQEILQRLEEIAEDPSTCEICAYAACTGC

SEQ ID NO: 4583 - protein, 16 aa, Artificial Sequence
  Synthetic
VGDDVTTLLTRGEALC

SEQ ID NO: 4584 - protein, 35 aa, Artificial Sequence
  Synthetic
GSDIIENAVEFILRSMTRSTEFLEHGDKQGEHSSK

SEQ ID NO: 4585 - protein, 33 aa, Artificial Sequence
  Synthetic
NVAEKIAEKVGEAAEVIGTIVADSDDGQEHNEL

SEQ ID NO: 4586 - protein, 30 aa, Artificial Sequence
  Synthetic
FRDGCESVLNQVTCEYEFYRLDDLSKRCDA

SEQ ID NO: 4587 - protein, 25 aa, Artificial Sequence
  Synthetic
QAIEALGSSGGRPSKIAKITDIGLL

SEQ ID NO: 4588 - protein, 25 aa, Artificial Sequence
  Synthetic
TGAETLAEEANTLAEALLEEEMMDN

SEQ ID NO: 4589 - protein, 29 aa, Artificial Sequence
  Synthetic
ASSCFNNVNDILRQDVEVVEYLNDLMDTF

SEQ ID NO: 4590 - protein, 41 aa, Artificial Sequence
  Synthetic
AGATAGLTPVAQRLRRDTHFPICIFCCGCCRKAICGMCCKT

SEQ ID NO: 4591 - protein, 15 aa, Artificial Sequence
  Synthetic
IKSGVEKLKNFLQRG

SEQ ID NO: 4592 - protein, 17 aa, Artificial Sequence
  Synthetic
YKNCVKDLEEAGKETEE

SEQ ID NO: 4593 - protein, 18 aa, Artificial Sequence
  Synthetic
GCATGYLRTADGRCKPTF

SEQ ID NO: 4594 - protein, 42 aa, Artificial Sequence
  Synthetic
LSQLCEELSDCANDIECRGDKKCCFSRCAMRYLEPILESTPQ

SEQ ID NO: 4595 - protein, 17 aa, Artificial Sequence
  Synthetic
GYNAAYDRYFRQRRGAK

SEQ ID NO: 4596 - protein, 29 aa, Artificial Sequence
  Synthetic
AQEMLQRLEEIAEDPSTCEICAYAACTGC

SEQ ID NO: 4597 - protein, 17 aa, Artificial Sequence
  Synthetic
RAAYVVDSCLQQCEDKK

SEQ ID NO: 4598 - protein, 17 aa, Artificial Sequence
  Synthetic
RAAYVVDSCLQQCEDKK

SEQ ID NO: 4599 - protein, 14 aa, Artificial Sequence
  Synthetic
LAEKAPEFARELAN

SEQ ID NO: 4600 - protein, 21 aa, Artificial Sequence
  Synthetic
LRDLKGALESLMEEETGQKKI

SEQ ID NO: 4601 - protein, 34 aa, Artificial Sequence
  Synthetic
LETIEDLCERAYSAFQCLREDYEMYQNNNNATSE

SEQ ID NO: 4602 - protein, 22 aa, Artificial Sequence
  Synthetic
EDVSTAVQNLQKALKLLTTGRE

SEQ ID NO: 4603 - protein, 27 aa, Artificial Sequence
  Synthetic
EGGGSDVDGLMDMDYNSANKKRPIHNR

SEQ ID NO: 4604 - protein, 18 aa, Artificial Sequence
  Synthetic
GAAQGLVNKASCKLSGQC

SEQ ID NO: 4605 - protein, 42 aa, Artificial Sequence
  Synthetic
CLKSAATSIKGINYGKAASLPRQCGVSVPYAISPNTNCNAIH

SEQ ID NO: 4606 - protein, 27 aa, Artificial Sequence
  Synthetic
SSIFKTLRTIANDDCELCVNVACTGCL

SEQ ID NO: 4607 - protein, 24 aa, Artificial Sequence
  Synthetic
KTAADAAAKAAAKAAAIAAAAASA

SEQ ID NO: 4608 - protein, 15 aa, Artificial Sequence
  Synthetic
FLDKVVAYMQTMKQA

SEQ ID NO: 4609 - protein, 23 aa, Artificial Sequence
  Synthetic
WSKIKEAAKTAGLMAMGFVNDMV

SEQ ID NO: 4610 - protein, 23 aa, Artificial Sequence
  Synthetic
NNMAKSINSGGELIRALDEEEVF

SEQ ID NO: 4611 - protein, 12 aa, Artificial Sequence
  Synthetic
LVAFVSAVVALF

SEQ ID NO: 4612 - protein, 41 aa, Artificial Sequence
  Synthetic
LQSVGRLASSLRLVNITLGSGTGLIRVGLAPTGFILNLNIN

SEQ ID NO: 4613 - protein, 38 aa, Artificial Sequence
  Synthetic
GCTTCCTGYKGCYYFGKNGKFVCEGESDEPKANMYPAM

SEQ ID NO: 4614 - protein, 17 aa, Artificial Sequence
  Synthetic
SVLDLCYSIFNSMHKNE

SEQ ID NO: 4615 - protein, 35 aa, Artificial Sequence
  Synthetic
TAARTVAKEVLTVVSLGWEMFCPYMSLDLARDRGR

SEQ ID NO: 4616 - protein, 29 aa, Artificial Sequence
  Synthetic
AQEILQRLEEIAEDPSTCEICAYAACTGC

SEQ ID NO: 4617 - protein, 29 aa, Artificial Sequence
  Synthetic
AQEILQRLEEIAEDPSTCEICAYAACTGC

SEQ ID NO: 4618 - protein, 29 aa, Artificial Sequence
  Synthetic
AQEILQRLEEIAEDPSTCEICAYAACTGC

SEQ ID NO: 4619 - protein, 22 aa, Artificial Sequence
  Synthetic
EGWEKCASYYTVIADCCRRPRS

SEQ ID NO: 4620 - protein, 17 aa, Artificial Sequence
  Synthetic
GYNAAYNRYFRQRRGAK

SEQ ID NO: 4621 - protein, 11 aa, Artificial Sequence
  Synthetic
LKALLSRYAGY

SEQ ID NO: 4622 - protein, 37 aa, Artificial Sequence
  Synthetic
IAAVVDIIRELGICPNDAAVTPISKNRFYTIKTLVVA

SEQ ID NO: 4623 - protein, 16 aa, Artificial Sequence
  Synthetic
FFTAYLQYMRSGNSFY

SEQ ID NO: 4624 - protein, 12 aa, Artificial Sequence
  Synthetic
GLSEALERAGRR

SEQ ID NO: 4625 - protein, 12 aa, Artificial Sequence
  Synthetic
MATNCAKACNSC

SEQ ID NO: 4626 - protein, 20 aa, Artificial Sequence
  Synthetic
GIESLYTGIVGGIVLILGLL

SEQ ID NO: 4627 - protein, 28 aa, Artificial Sequence
  Synthetic
ASSIFKTLRTIANDDCELCVNVACTGCL

SEQ ID NO: 4628 - protein, 27 aa, Artificial Sequence
  Synthetic
DELHKWVEEAIDMLQLTSSEDHHLTLR

SEQ ID NO: 4629 - protein, 19 aa, Artificial Sequence
  Synthetic
HQCPTGLSACIEGKCICLP

SEQ ID NO: 4630 - protein, 17 aa, Artificial Sequence
  Synthetic
FQHCVKDLEEAKKEPPE

SEQ ID NO: 4631 - protein, 22 aa, Artificial Sequence
  Synthetic
DRAEKVAEDLLRALRMQYEDES

SEQ ID NO: 4632 - protein, 23 aa, Artificial Sequence
  Synthetic
LEKYRAALEGLLSEVLLPARNDK

SEQ ID NO: 4633 - protein, 34 aa, Artificial Sequence
  Synthetic
GPGGECGGRFGGCAGGQCCSRFGFCGSGPKYCAH

SEQ ID NO: 4634 - protein, 20 aa, Artificial Sequence
  Synthetic
DIQKCCKNGCGHMSCTRPST

SEQ ID NO: 4635 - protein, 41 aa, Artificial Sequence
  Synthetic
MSGFKGYLSTVPVVFAIWLTFTAGLIIEINRLFPDGLVFSF

SEQ ID NO: 4636 - protein, 27 aa, Artificial Sequence
  Synthetic
AEAGTQVIHAGGHTLIQTDRSQYIRKN

SEQ ID NO: 4637 - protein, 27 aa, Artificial Sequence
  Synthetic
WVSSCLTIADEVADSLRSGDIGPFHVG

SEQ ID NO: 4638 - protein, 18 aa, Artificial Sequence
  Synthetic
ATGFFEELGSKLAGLFTG

SEQ ID NO: 4639 - protein, 25 aa, Artificial Sequence
  Synthetic
NQLLHLAEDLARRLLPAFDTPTGIP

SEQ ID NO: 4640 - protein, 13 aa, Artificial Sequence
  Synthetic
GFQEAYRRFYGTT

SEQ ID NO: 4641 - protein, 13 aa, Artificial Sequence
  Synthetic
GFQEAYRRFYGTT

SEQ ID NO: 4642 - protein, 13 aa, Artificial Sequence
  Synthetic
GFQEAYRRFYGTT

SEQ ID NO: 4643 - protein, 35 aa, Artificial Sequence
  Synthetic
KCAKKIARDAHGLTPWYGWKNHCEGRDLSSYVKGC

SEQ ID NO: 4644 - protein, 34 aa, Artificial Sequence
  Synthetic
NALKEAIKGVQNAVITINEHLEEVRYEIAALETE

SEQ ID NO: 4645 - protein, 20 aa, Artificial Sequence
  Synthetic
RGCQRCCSYAGEAVEVETHA

SEQ ID NO: 4646 - protein, 13 aa, Artificial Sequence
  Synthetic
VGSIIGDLIQGAK

SEQ ID NO: 4647 - protein, 15 aa, Artificial Sequence
  Synthetic
QCCNAFCDTATRTCV

SEQ ID NO: 4648 - protein, 14 aa, Artificial Sequence
  Synthetic
ILGLVSNALGGLLG

SEQ ID NO: 4649 - protein, 29 aa, Artificial Sequence
  Synthetic
AQEILQRLEEIAEDPGTCEICAYAACTGC

SEQ ID NO: 4650 - protein, 29 aa, Artificial Sequence
  Synthetic
AQEILQRLEEIAEDPGTCEICAYAACTGC

SEQ ID NO: 4651 - protein, 31 aa, Artificial Sequence
  Synthetic
GKRYIRGCADTCPVRKPREIVECCSTDKCNH

SEQ ID NO: 4652 - protein, 31 aa, Artificial Sequence; identical to SEQ ID NO: 4651
  Synthetic

SEQ ID NO: 4653 - protein, 42 aa, Artificial Sequence
  Synthetic
GKASGFLGTLCEKILSFGVDELVKLIENHVDPVVVCEKIHAC

SEQ ID NO: 4654 - protein, 19 aa, Artificial Sequence
  Synthetic
KQMEAIIKKLTDQTMAIEN

SEQ ID NO: 4655 - protein, 36 aa, Artificial Sequence
  Synthetic
ATLPNYCRAGGNGPKDFVCQGVADAYITLVTLPKSS

SEQ ID NO: 4656 - protein, 30 aa, Artificial Sequence
  Synthetic
KFVSDVADYFWEMAKISGKVVGNGIASQNE

SEQ ID NO: 4657 - protein, 27 aa, Artificial Sequence
  Synthetic
VLEYVVHFLSSLWDTKEEHRHENQTSY

SEQ ID NO: 4658 - protein, 37 aa, Artificial Sequence
  Synthetic
HDAHTCLSALPERNSTNYFVQPCCCLRLLGLTGLLSK

SEQ ID NO: 4659 - protein, 17 aa, Artificial Sequence
  Synthetic
TVLDLCYSIFNNMHKNE

SEQ ID NO: 4660 - protein, 29 aa, Artificial Sequence
  Synthetic
QFVEIINNVINDAINNREIDESLPQYSET

SEQ ID NO: 4661 - protein, 38 aa, Artificial Sequence
  Synthetic
VGKRGLRNLDDLDDLDLDHLFDSDVSDADLRLLKQMFR

SEQ ID NO: 4662 - protein, 13 aa, Artificial Sequence
  Synthetic
QYSRLGENWARNK

SEQ ID NO: 4663 - protein, 34 aa, Artificial Sequence; identical to SEQ ID NO: 4601
  Synthetic

SEQ ID NO: 4664 - protein, 22 aa, Artificial Sequence
  Synthetic
CRSGGAGAGSMICLCDYCSDKP

SEQ ID NO: 4665 - protein, 32 aa, Artificial Sequence
  Synthetic
LEDFQNAVRAGGLNPDNIFIPKQSETCPLGSN

SEQ ID NO: 4666 - protein, 24 aa, Artificial Sequence
  Synthetic
FFKSCVELLNKGYDEKDENVKPEW

SEQ ID NO: 4667 - protein, 39 aa, Artificial Sequence
  Synthetic
LKGLPTCGETCFGGTCNTPGCTCDPWPICTRDGLPSAAA

SEQ ID NO: 4668 - protein, 13 aa, Artificial Sequence
  Synthetic
IYEWLQGGLDWAE

SEQ ID NO: 4669 - protein, 34 aa, Artificial Sequence
  Synthetic
NVKEVLENGGTTLSKKTILLLVTPFLAAAWSRHP

SEQ ID NO: 4670 - protein, 42 aa, Artificial Sequence
  Synthetic
CKGGNNACAAAVCDCDRLAAICFAGAPYNDNNYNIDLKARCQ

SEQ ID NO: 4671 - protein, 42 aa, Artificial Sequence; identical to SEQ ID NO: 4670
  Synthetic

SEQ ID NO: 4672 - protein, 22 aa, Artificial Sequence
  Synthetic
CKSCGTSCAGSCTSCSCGSCSH

SEQ ID NO: 4673 - protein, 21 aa, Artificial Sequence
  Synthetic
LYTAFGQPAQQLRDPFEEHGD

SEQ ID NO: 4674 - protein, 14 aa, Artificial Sequence
  Synthetic
VEIASEGFKRAIES

SEQ ID NO: 4675 - protein, 13 aa, Artificial Sequence
  Synthetic
GQDLSSYVAGCGV

SEQ ID NO: 4676 - protein, 29 aa, Artificial Sequence
  Synthetic
ASSCFNNVNDVLRQDVEVVEYLNDLMDTF

SEQ ID NO: 4677 - protein, 29 aa, Artificial Sequence
  Synthetic
ASSCFNNVNDVLRQDVEVVEYLNDLMDTF

SEQ ID NO: 4678 - protein, 36 aa, Artificial Sequence
  Synthetic
ECDRVAATCFRDNKDTYDMKYWLYGAKNCQEESEPC

SEQ ID NO: 4679 - protein, 22 aa, Artificial Sequence
  Synthetic
EGWEKCASYYTVVADCCRRPRS

SEQ ID NO: 4680 - protein, 37 aa, Artificial Sequence
  Synthetic
IAAVVDVIRELGICPDDAAVIPIKNNRFYTIEILKVE

SEQ ID NO: 4681 - protein, 26 aa, Artificial Sequence
  Synthetic
RQYAAQLPSMCRVEPQQCSIFAAGQY

SEQ ID NO: 4682 - protein, 15 aa, Artificial Sequence
  Synthetic
EQVADDVKELASDVI

SEQ ID NO: 4683 - protein, 34 aa, Artificial Sequence
  Synthetic
KDLCNGVAGAGHSPWALAGGLLLSLGPALLWAGP

SEQ ID NO: 4684 - protein, 42 aa, Artificial Sequence
  Synthetic
SPGSRVFKSGDDRITLSRGTNYFICSVPGHCQGGLKIAVTAA

SEQ ID NO: 4685 - protein, 15 aa, Artificial Sequence
  Synthetic
DGLRGLTQGIQDQQY

SEQ ID NO: 4686 - protein, 27 aa, Artificial Sequence
  Synthetic
WVSSCLTVADELASSLRTGDIGPFHVG

SEQ ID NO: 4687 - protein, 26 aa, Artificial Sequence
  Synthetic
DPFEKAANHMREALKFENLKGREVKS

SEQ ID NO: 4688 - protein, 34 aa, Artificial Sequence
  Synthetic
GWMDGWMDGWMDGWMDGWMDGWMGGLGRSEGIRD

SEQ ID NO: 4689 - protein, 41 aa, Artificial Sequence
  Synthetic
GICDTYLECGGLACSDYRRACCVNGKCVCRKQGQTLPDCPN

SEQ ID NO: 4690 - protein, 14 aa, Artificial Sequence
  Synthetic
VEIASEGFKRAIES

SEQ ID NO: 4691 - protein, 33 aa, Artificial Sequence
  Synthetic
ELLDKFQQFAKEQGLTDDNILILPQTDSCMSEV

SEQ ID NO: 4692 - protein, 16 aa, Artificial Sequence
  Synthetic
VLELVRGLGRGALRAV

SEQ ID NO: 4693 - protein, 31 aa, Artificial Sequence; identical to SEQ ID NO: 4522
  Synthetic

SEQ ID NO: 4694 - protein, 40 aa, Artificial Sequence
  Synthetic
DKAIRTIMEFLAFLHLKEAGALGRLPGLPSAASSEDAGQS

SEQ ID NO: 4695 - protein, 14 aa, Artificial Sequence
  Synthetic
LLGFVGSLLGGLGI

SEQ ID NO: 4696 - protein, 29 aa, Artificial Sequence
  Synthetic
ASSCFNNVNDILRQDVEVVEYLNDLMDTF

SEQ ID NO: 4697 - protein, 27 aa, Artificial Sequence
  Synthetic
YLKSLYGGYGNGNGEFWEEYIDERYDN

SEQ ID NO: 4698 - protein, 35 aa, Artificial Sequence
  Synthetic
DLVTKFLNNAFTAAQAAQTSKGTLESLQYYFIVRI

SEQ ID NO: 4699 - protein, 35 aa, Artificial Sequence; identical to SEQ ID NO: 4698
  Synthetic

SEQ ID NO: 4700 - protein, 27 aa, Artificial Sequence
  Synthetic
EDIPECVKQWISTLSLHECSDVTNSCL

SEQ ID NO: 4701 - protein, 27 aa, Artificial Sequence
  Synthetic
EDIPECVKQWISTLSLHECSDVTNSCL

SEQ ID NO: 4702 - protein, 14 aa, Artificial Sequence
  Synthetic
GAVKSLLGVLTMFG

SEQ ID NO: 4703 - protein, 38 aa, Artificial Sequence
  Synthetic
HSGSQVGKALLGIQSANRTDGPGRKRRSFDLYALVNAK

SEQ ID NO: 4704 - protein, 34 aa, Artificial Sequence
  Synthetic
SGYCQWAGKYGNACWCYALPDNVPIRVPGKCHRK

SEQ ID NO: 4705 - protein, 14 aa, Artificial Sequence
  Synthetic
LLGMVGSLLGGLGL

SEQ ID NO: 4706 - protein, 24 aa, Artificial Sequence
  Synthetic
ARGCGTSCPGGIRPVCCRTDLSNK

SEQ ID NO: 4707 - protein, 25 aa, Artificial Sequence
  Synthetic
KRAASEVSEFFRNAIDADFNHFDPG

SEQ ID NO: 4708 - protein, 35 aa, Artificial Sequence
  Synthetic
GTEIIENAVEFILRSMSRSTGFMEFDDNEGKHSSK

SEQ ID NO: 4709 - protein, 24 aa, Artificial Sequence
  Synthetic
NCDRVAANCFAKAPYNKRNYNNCK

SEQ ID NO: 4710 - protein, 17 aa, Artificial Sequence
  Synthetic
LLSKAGAVLSNGDNVQF

SEQ ID NO: 4711 - protein, 16 aa, Artificial Sequence
  Synthetic
GTHIWNEIRGWSHWSG

SEQ ID NO: 4712 - protein, 16 aa, Artificial Sequence
  Synthetic
GTHIWNEIRGWSHWSG

SEQ ID NO: 4713 - protein, 26 aa, Artificial Sequence
  Synthetic
LGTCYTQGCTCSWPICKRNGLPDVAA

SEQ ID NO: 4714 - protein, 35 aa, Artificial Sequence
  Synthetic
QVSEILKQAIQKFNTHSAEPALFKLVEIKEAKRQV

SEQ ID NO: 4715 - protein, 16 aa, Artificial Sequence
  Synthetic
AQYSRLGGNWPRNKRS

SEQ ID NO: 4716 - protein, 26 aa, Artificial Sequence
  Synthetic
DNAKSALQHLNQRCCQTFYWCCVQGK

SEQ ID NO: 4717 - protein, 26 aa, Artificial Sequence
  Synthetic
DNAKSALQHLNQRCCQTFYWCCGQGK

SEQ ID NO: 4718 - protein, 25 aa, Artificial Sequence
  Synthetic
QEANAWGRNGGDPNRYRPPGLPSKY

SEQ ID NO: 4719 - protein, 23 aa, Artificial Sequence
  Synthetic
HAFEFMQRALQDLKKTAYNLDTR

SEQ ID NO: 4720 - protein, 23 aa, Artificial Sequence
  Synthetic
HAFEFMQRALQDLKKTAYNLDTR

SEQ ID NO: 4721 - protein, 23 aa, Artificial Sequence
  Synthetic
HAFEFMQRALQDLKKTAYSLDTR

SEQ ID NO: 4722 - protein, 23 aa, Artificial Sequence
  Synthetic
HAFEFMQRALQDLKKTAYNLDTR

SEQ ID NO: 4723 - protein, 23 aa, Artificial Sequence
  Synthetic
HAFEFMQRALQDLKKTAYNLDTR

SEQ ID NO: 4724 - protein, 23 aa, Artificial Sequence
  Synthetic
HAFEFMQRALQDLKKTAYNLDTR

SEQ ID NO: 4725 - protein, 23 aa, Artificial Sequence
  Synthetic
HAFEFMQRALQDLKKTAYNLDTR

SEQ ID NO: 4726 - protein, 23 aa, Artificial Sequence
  Synthetic
HAFEFMQRALQDLKKTAYNLDTR

SEQ ID NO: 4727 - protein, 23 aa, Artificial Sequence
  Synthetic
HAFEFMQRALQDLKKTAYNLDTR

SEQ ID NO: 4728 - protein, 23 aa, Artificial Sequence
  Synthetic
HAFEFMQRALQDLKKTAYNLDTR

SEQ ID NO: 4729 - protein, 23 aa, Artificial Sequence
  Synthetic
HAFEFMQRALQDLKKTAYNLDTR

SEQ ID NO: 4730 - protein, 23 aa, Artificial Sequence
  Synthetic
HAFEFMQRALQDLKKTAYNLDTR

SEQ ID NO: 4731 - protein, 23 aa, Artificial Sequence
  Synthetic
HAFEFMQRALQDLKKTAYNLDTR

SEQ ID NO: 4732 - protein, 13 aa, Artificial Sequence
  Synthetic
IYEWLQGGLEWAE

SEQ ID NO: 4733 - protein, 35 aa, Artificial Sequence
  Synthetic
VARIIKNLISSIVTAIVTAVTTVLATEGLPGNING

SEQ ID NO: 4734 - protein, 23 aa, Artificial Sequence
  Synthetic
IETGFHKWENFYCEQQDPFVCEA

SEQ ID NO: 4735 - protein, 32 aa, Artificial Sequence
  Synthetic
LEDFQSVVRAGGLNPDNIFIPKQSETCPLGSN

SEQ ID NO: 4736 - protein, 24 aa, Artificial Sequence
  Synthetic
ARGCGTSCPGGIRPVCCRTDLCNK

SEQ ID NO: 4737 - protein, 18 aa, Artificial Sequence
  Synthetic
MAELRAIYGGGPVEYVQL

SEQ ID NO: 4738 - protein, 12 aa, Artificial Sequence
  Synthetic
VLNSADNLVHGL

SEQ ID NO: 4739 - protein, 27 aa, Artificial Sequence
  Synthetic
DLINKCGRGGVGGGGLNGIFLSYEGVV

SEQ ID NO: 4740 - protein, 16 aa, Artificial Sequence
  Synthetic
EFGRCLQEIISNASES

SEQ ID NO: 4741 - protein, 34 aa, Artificial Sequence
  Synthetic
LNSAATLASSLLSELLACQGWCSFMHTWFSIEHS

SEQ ID NO: 4742 - protein, 16 aa, Artificial Sequence
  Synthetic
AVDSIRRMASEATEAP

SEQ ID NO: 4743 - protein, 39 aa, Artificial Sequence
  Synthetic
GDLERAAASLPAFCNVDIPNGPGGVCYWLGYPRTPRTGH

SEQ ID NO: 4744 - protein, 27 aa, Artificial Sequence
  Synthetic
IATFVTDIFQGAKYFRVKMDIKLYECY

SEQ ID NO: 4745 - protein, 27 aa, Artificial Sequence
  Synthetic
IATFVTDIFQGAKYFRVKMDIKLYECY

SEQ ID NO: 4746 - protein, 27 aa, Artificial Sequence
  Synthetic
IATFVTDIFQGAKYFRVKMDIKLYECY

SEQ ID NO: 4747 - protein, 39 aa, Artificial Sequence
  Synthetic
AQEAWAPVQSALQEAAEKTKEAAANLQNSIQSAVQKPAN

SEQ ID NO: 4748 - protein, 17 aa, Artificial Sequence
  Synthetic
QWCTAGCNSITSKCDTL

SEQ ID NO: 4749 - protein, 18 aa, Artificial Sequence
  Synthetic
KTLVNLWSKLAQRIFLVS

SEQ ID NO: 4750 - protein, 18 aa, Artificial Sequence
  Synthetic
AAWGATLDAFFGMVFAKM

SEQ ID NO: 4751 - protein, 18 aa, Artificial Sequence
  Synthetic
GAAKGLLEVASCKLSKSC

SEQ ID NO: 4752 - protein, 38 aa, Artificial Sequence
  Synthetic
DKARELISRIKQSELSAKMREWFSETFQKVKEKLKIDS

SEQ ID NO: 4753 - protein, 42 aa, Artificial Sequence
  Synthetic
CLKNAAAGVSGLNAGNAASIPSKCGVSIPYTISTSTDCSRVN

SEQ ID NO: 4754 - protein, 33 aa, Artificial Sequence
  Synthetic
CGSDGKTYANKCHLMTEACWSPTSITLVHEGKC

SEQ ID NO: 4755 - protein, 21 aa, Artificial Sequence
  Synthetic
RSFRNGVGSGVKKTSFRRAKQ

SEQ ID NO: 4756 - protein, 36 aa, Artificial Sequence
  Synthetic
ECDRVAATCFRDNKDTYDNKYWFYPAKNCQEESEPC

SEQ ID NO: 4757 - protein, 11 aa, Artificial Sequence
  Synthetic
NCVRSYCTLFG

SEQ ID NO: 4758 - protein, 28 aa, Artificial Sequence
  Synthetic
DVQEAAKEAVEQFNSKPRAKKYFKLIKI

SEQ ID NO: 4759 - protein, 25 aa, Artificial Sequence
  Synthetic
WVGSCASGWHKCNDEYNIAYECCKE

SEQ ID NO: 4760 - protein, 25 aa, Artificial Sequence
  Synthetic
WVGSCASGWHKCNDEYNIAYECCKE

SEQ ID NO: 4761 - protein, 23 aa, Artificial Sequence
  Synthetic
YGGCGGNANNFKTIEECQRTCAG

SEQ ID NO: 4762 - protein, 20 aa, Artificial Sequence
  Synthetic
FVASVAAEMQHVYCAASRKC

SEQ ID NO: 4763 - protein, 17 aa, Artificial Sequence
  Synthetic
ERLAYEATSVANNVDDH

SEQ ID NO: 4764 - protein, 27 aa, Artificial Sequence
  Synthetic
IPEAIARAVAWLEAHPQAPEPVHHSHH

SEQ ID NO: 4765 - protein, 28 aa, Artificial Sequence
  Synthetic
NDCEEAAQELFQQIQEAQADLASKGLIL

SEQ ID NO: 4766 - protein, 39 aa, Artificial Sequence
  Synthetic
DKAKKAIERIKQSDLPAKTRNWFTETFGKVRDTFKATFS

SEQ ID NO: 4767 - protein, 37 aa, Artificial Sequence
  Synthetic
ISVAATCAKKIYKRHKFDAWYGWKNHCQHGLPDISDC

SEQ ID NO: 4768 - protein, 13 aa, Artificial Sequence
  Synthetic
IYEWLQGGLEWAE

SEQ ID NO: 4769 - protein, 40 aa, Artificial Sequence
  Synthetic
LEKYRAALEAAERAVHPDAPSRPCWPAGGESGWSGEPSPT

SEQ ID NO: 4770 - protein, 15 aa, Artificial Sequence
  Synthetic
EVGEAFRTAVSGAEK

SEQ ID NO: 4771 - protein, 38 aa, Artificial Sequence
  Synthetic
VHEICGGVFDGGCYCCPKTPALCWADIQFCTTYCQSQT

SEQ ID NO: 4772 - protein, 26 aa, Artificial Sequence
  Synthetic
DNVKRILQTLSNKRSCCPTILSCCFV

SEQ ID NO: 4773 - protein, 27 aa, Artificial Sequence
  Synthetic
IATFVTDLFQGARYFRVKMDIKLYECY

SEQ ID NO: 4774 - protein, 28 aa, Artificial Sequence
  Synthetic
DEMNTILDNLATRDFINWLIQTKITDRK

SEQ ID NO: 4775 - protein, 34 aa, Artificial Sequence
  Synthetic
SGYCQWAGRYGNACWCIDLPDKVPIRIPGPCIGR

SEQ ID NO: 4776 - protein, 23 aa, Artificial Sequence
  Synthetic
YGGCGGNANNFKTIDECQRTCAG

SEQ ID NO: 4777 - protein, 36 aa, Artificial Sequence
  Synthetic
TCINDFVKKGGVAAKPSSCECDDFGEEHLCRCYVPC

SEQ ID NO: 4778 - protein, 40 aa, Artificial Sequence
  Synthetic
NNVVRTIIEFLTFLHLKDAGALERLPSLPTAESAEDAERS

SEQ ID NO: 4779 - protein, 27 aa, Artificial Sequence
  Synthetic
IATFVTDLFQGAKYFRVKMDIKLYECY

SEQ ID NO: 4780 - protein, 26 aa, Artificial Sequence
  Synthetic
NTVIEEASKVCSKMRRLKGLCKSIMK

SEQ ID NO: 4781 - protein, 19 aa, Artificial Sequence
  Synthetic
DIEDVANYILTQAEKGWSN

SEQ ID NO: 4782 - protein, 25 aa, Artificial Sequence
  Synthetic
LGNLAEELNGYSRKKGGFSFRFGRR

SEQ ID NO: 4783 - protein, 23 aa, Artificial Sequence
  Synthetic
VVALISALVTGILALRLGRELYR

SEQ ID NO: 4784 - protein, 12 aa, Artificial Sequence
  Synthetic
GGCHELCQCCEG

SEQ ID NO: 4785 - protein, 28 aa, Artificial Sequence
  Synthetic
EKADAVYTGLNTRSQETYETLKHEKPPQ

SEQ ID NO: 4786 - protein, 23 aa, Artificial Sequence
  Synthetic
QNAWDKVKTIISEMQLQFSPPNL

SEQ ID NO: 4787 - protein, 39 aa, Artificial Sequence
  Synthetic
KLAKRCLESGSLCFAGYGHSSCCSGACLDYGGLGVGACR

SEQ ID NO: 4788 - protein, 24 aa, Artificial Sequence
  Synthetic
IYGGCYGNANNFKTIDECKRTCAA

SEQ ID NO: 4789 - protein, 40 aa, Artificial Sequence
  Synthetic
AGILTMGRRAGAELEPHPCSGRGCPTVTTTALAPRGGSGV

SEQ ID NO: 4790 - protein, 13 aa, Artificial Sequence
  Synthetic
VGAAVGGALAFLI

SEQ ID NO: 4791 - protein, 28 aa, Artificial Sequence
  Synthetic
QEADHVADKLCSEVSGLCKGVPVSRGEL

SEQ ID NO: 4792 - protein, 40 aa, Artificial Sequence
  Synthetic
QKFLNKIYQYYQTFLWPEYLKTVYQYQKTMTPWNHIKRYF

SEQ ID NO: 4793 - protein, 40 aa, Artificial Sequence
  Synthetic
GGGGGGGGARRLKGLAKKRAGNGCFGLKLDRIGSMSGLGC

SEQ ID NO: 4794 - protein, 39 aa, Artificial Sequence
  Synthetic
DMAKAALTELKSCIDELQPVHKEQLVKLLVQVLDAQEDT

SEQ ID NO: 4795 - protein, 37 aa, Artificial Sequence
  Synthetic
LFRAAPSLLNSASAASMLWAELIAMAPSIPSALPPFS

SEQ ID NO: 4796 - protein, 25 aa, Artificial Sequence
  Synthetic
DNFYQSCVDLLNKVYEEKDTPPVQE

SEQ ID NO: 4797 - protein, 36 aa, Artificial Sequence
  Synthetic
AEQAVKTGCRSVPGDANAPFPDCCPTTLCRGRQWDH

SEQ ID NO: 4798 - protein, 21 aa, Artificial Sequence
  Synthetic
GIVEQCCAGVCSLYQLENYCN

SEQ ID NO: 4799 - protein, 32 aa, Artificial Sequence
  Synthetic
SDFKSAISDCGRGDYTGCGVASGKIVGILMRQ

SEQ ID NO: 4800 - protein, 29 aa, Artificial Sequence
  Synthetic
ASSCFNNVNDVLRQDVEVVEYLNDLMDTF

SEQ ID NO: 4801 - protein, 32 aa, Artificial Sequence
  Synthetic
FMDTAKNVAKNVAKNVAVTLLDKLRCKVTGGC

SEQ ID NO: 4802 - protein, 42 aa, Artificial Sequence
  Synthetic
YNQIINTFIDDCLFLQTPMLQSPISSKIVLSFFLRNFFPSLF

SEQ ID NO: 4803 - protein, 21 aa, Artificial Sequence
  Synthetic
GIVEQCCASVCSLYQLENYCN

SEQ ID NO: 4804 - protein, 26 aa, Artificial Sequence
  Synthetic
ASTVVTYVYQLIEDDVKVERIEFKKY

SEQ ID NO: 4805 - protein, 26 aa, Artificial Sequence
  Synthetic
ASTVVTYVYQLIEDDVKVERIEFKKY

SEQ ID NO: 4806 - protein, 14 aa, Artificial Sequence
  Synthetic
GFQDAYKRIYGTTV

SEQ ID NO: 4807 - protein, 26 aa, Artificial Sequence
  Synthetic
DNFYQSCVDLLNKVYEEKDVPVPPEE

SEQ ID NO: 4808 - protein, 24 aa, Artificial Sequence
  Synthetic
LYTFCTFVQTCVSMCVCVCVGSCL

SEQ ID NO: 4809 - protein, 41 aa, Artificial Sequence
  Synthetic
VNGYIESGVKQVNLCGWNERWRSVPSFVKFMFLTQPNWCYA

SEQ ID NO: 4810 - protein, 30 aa, Artificial Sequence
  Synthetic
GKVAEAIVDAAKAAKTIIADTDDAPEHEEL

SEQ ID NO: 4811 - protein, 25 aa, Artificial Sequence
  Synthetic
GLLSVLGSVAQHVLPHVVPVIAEHL

SEQ ID NO: 4812 - protein, 37 aa, Artificial Sequence
  Synthetic
FKGARDCGEQGQGCYTRPCCPGLHCAAGATGGGSCQP

SEQ ID NO: 4813 - protein, 42 aa, Artificial Sequence
  Synthetic
AQYAAELRRYINMLTRPRYGKRDKEGTLDFLECGSPHSAVPR

SEQ ID NO: 4814 - protein, 38 aa, Artificial Sequence
  Synthetic
DKARELISRIKQNELSAKMREWFSETFQKVKEKLKIDS

SEQ ID NO: 4815 - protein, 14 aa, Artificial Sequence
  Synthetic
VEIASEGVKRAIES

SEQ ID NO: 4816 - protein, 17 aa, Artificial Sequence
  Synthetic
GLMKEVKEIASAPPPAQ

SEQ ID NO: 4817 - protein, 17 aa, Artificial Sequence
  Synthetic
GAGVFGAAVAAGVAFLF

SEQ ID NO: 4818 - protein, 40 aa, Artificial Sequence
  Synthetic
AACDSLVDTVFNTVWTLGCRPFMNSQRAACICAEEEKEEL

SEQ ID NO: 4819 - protein, 32 aa, Artificial Sequence
  Synthetic
VTGLLGLLEELASNLPTGPFSPKPDLLGDDGF

SEQ ID NO: 4820 - protein, 42 aa, Artificial Sequence
  Synthetic
CYGAAGTCARVVCDCDRTAALCFGNSEYIEGHKNIDTARFCQ

SEQ ID NO: 4821 - protein, 32 aa, Artificial Sequence
  Synthetic
VAHVREMFSNVFNSIKTQREQAMAANGSQPTD

SEQ ID NO: 4822 - protein, 25 aa, Artificial Sequence
  Synthetic
LYTAFGNPASGLKDPFEGHEDWSDQ

SEQ ID NO: 4823 - protein, 14 aa, Artificial Sequence
  Synthetic
HAINAVSTLVHHSG

SEQ ID NO: 4824 - protein, 18 aa, Artificial Sequence
  Synthetic
KKIEEMIKYIASPAQASQ

SEQ ID NO: 4825 - protein, 27 aa, Artificial Sequence
  Synthetic
ATSIVNSLKTALTHRNNYKQFAITNAF

SEQ ID NO: 4826 - protein, 17 aa, Artificial Sequence
  Synthetic
GYNAAYNRYFRERRGAK

SEQ ID NO: 4827 - protein, 33 aa, Artificial Sequence
  Synthetic
CGTDGITYANECVLCFENRKRIEPVLIRKGGPC

SEQ ID NO: 4828 - protein, 17 aa, Artificial Sequence
  Synthetic
TSILDLLKKVVTKIVCE

SEQ ID NO: 4829 - protein, 37 aa, Artificial Sequence
  Synthetic
FKGARDCGGQGEGCYTQPCCPGLRCRGGGTGGGACQL

SEQ ID NO: 4830 - protein, 37 aa, Artificial Sequence
  Synthetic
FKGARDCGGQGEGCYTQPCCPGLRCRGGGTGGGVCQL

SEQ ID NO: 4831 - protein, 37 aa, Artificial Sequence; identical to SEQ ID NO: 4830
  Synthetic

SEQ ID NO: 4832 - protein, 37 aa, Artificial Sequence
  Synthetic
FKGARDCGGQGEGCYTQPCCPGLRCRGGGTGGGSCQP

SEQ ID NO: 4833 - protein, 30 aa, Artificial Sequence
  Synthetic
KCIDRCDEFCKTMEYPNGGDCNTGPCCCLW

SEQ ID NO: 4834 - protein, 25 aa, Artificial Sequence
  Synthetic
QKAEEWGRSGKNPNHFRPEGLPEKF

SEQ ID NO: 4835 - protein, 18 aa, Artificial Sequence
  Synthetic
GQSAGAKCMNGKCKCYPH

SEQ ID NO: 4836 - protein, 36 aa, Artificial Sequence
  Synthetic
KEGCRKLLGGCTIDDDCCPHLGCNKKYWHCGWDGTF

SEQ ID NO: 4837 - protein, 31 aa, Artificial Sequence
  Synthetic
KVAEKVASVASEAVDAAKTVIADTDEGHGEL

SEQ ID NO: 4838 - protein, 33 aa, Artificial Sequence
  Synthetic
CGSDGQTYGNKCAFCKALEKSSGKINLKHRGKC

SEQ ID NO: 4839 - protein, 33 aa, Artificial Sequence; identical to SEQ ID NO: 4838
  Synthetic

SEQ ID NO: 4840 - protein, 26 aa, Artificial Sequence
  Synthetic
KFFRSCVDHLSGAYDEKDDVEAPPPE

SEQ ID NO: 4841 - protein, 31 aa, Artificial Sequence
  Synthetic
VQSFVNDLIKCANYSLITVFSMLFALIYIMI

SEQ ID NO: 4842 - protein, 32 aa, Artificial Sequence
  Synthetic
AESVKTAASEAKKVAEAILVDAVDGDQEHMEL

SEQ ID NO: 4843 - protein, 29 aa, Artificial Sequence
  Synthetic
AEQVVQGMKEAQERLTGDAFRKKHLEDEL

SEQ ID NO: 4844 - protein, 20 aa, Artificial Sequence
  Synthetic
GRRCLAAAASSVAPGGRSGI

SEQ ID NO: 4845 - protein, 36 aa, Artificial Sequence
  Synthetic
ECDRVAATCFRDNKDTYDNKYWFFPAKNCQEESEPC

SEQ ID NO: 4846 - protein, 22 aa, Artificial Sequence
  Synthetic
LEEYLATIRGYLRHDLAAAETI

SEQ ID NO: 4847 - protein, 14 aa, Artificial Sequence
  Synthetic
TLFNQAADILDHVV

SEQ ID NO: 4848 - protein, 37 aa, Artificial Sequence
  Synthetic
IAAVVDVIRELGICPDDAAVIPIKNNRFYTIETLEVE

SEQ ID NO: 4849 - protein, 38 aa, Artificial Sequence; identical to SEQ ID NO: 4613
  Synthetic

SEQ ID NO: 4850 - protein, 30 aa, Artificial Sequence
  Synthetic
EECDEYCEDLNKNCCGLSNGEPVCATACLG

SEQ ID NO: 4851 - protein, 30 aa, Artificial Sequence
  Synthetic
GYGQHLGGPYGNSEPSWKVGSTYTYRFPNF

SEQ ID NO: 4852 - protein, 13 aa, Artificial Sequence
  Synthetic
EDLDHLAHSMEDS

SEQ ID NO: 4853 - protein, 20 aa, Artificial Sequence
  Synthetic
GHGYCNTLDDFSLCLCKYPC

SEQ ID NO: 4854 - protein, 18 aa, Artificial Sequence
  Synthetic
RQAESVVTTLAEALKLAG

SEQ ID NO: 4855 - protein, 38 aa, Artificial Sequence; identical to SEQ ID NO: 4613
  Synthetic

SEQ ID NO: 4856 - protein, 22 aa, Artificial Sequence
  Synthetic
DLLNTAGGLLGNLVGSLSGGER

SEQ ID NO: 4857 - protein, 37 aa, Artificial Sequence
  Synthetic
EDVVHTIIDFLSYLKLKEIGALDSLPSSLTSEEISQP

SEQ ID NO: 4858 - protein, 21 aa, Artificial Sequence
  Synthetic
VQYALSCFQQAVNGVGNENGN

SEQ ID NO: 4859 - protein, 30 aa, Artificial Sequence
  Synthetic
QGAKEALTELKSCIDGLQPTHKADLVELLV

SEQ ID NO: 4860 - protein, 21 aa, Artificial Sequence
  Synthetic
GIVEQCCASVCSLYQLEHYCN

SEQ ID NO: 4861 - protein, 21 aa, Artificial Sequence
  Synthetic
RSFRNGVGTGMKKTSFRRAKS

SEQ ID NO: 4862 - protein, 38 aa, Artificial Sequence
  Synthetic
VSYGHQGCSSLCVPMKFFRPNVTVDFRCCHDSPFCNKF

SEQ ID NO: 4863 - protein, 40 aa, Artificial Sequence
  Synthetic
MDEISSGVNACKDIKGTNDCDTAFKVTMCLKEHKAIPGHH

SEQ ID NO: 4864 - protein, 21 aa, Artificial Sequence
  Synthetic
RSFRNGVGSGAKKTSFRRAKQ

SEQ ID NO: 4865 - protein, 32 aa, Artificial Sequence
  Synthetic
IPEAIARALAYIEAHPPSPSVVERKVVANLLG

SEQ ID NO: 4866 - protein, 17 aa, Artificial Sequence
  Synthetic
GYNAAYNRYFRKRRGTK

SEQ ID NO: 4867 - protein, 34 aa, Artificial Sequence
  Synthetic
FASVGGKCQEFIYGGCGGNANNFQTQAECEAKCG

SEQ ID NO: 4868 - protein, 21 aa, Artificial Sequence
  Synthetic
RMKRMMEEFLYAVNKTEQALT

SEQ ID NO: 4869 - protein, 20 aa, Artificial Sequence
  Synthetic
QQAIHKAESFAEYLAKRQAS

SEQ ID NO: 4870 - protein, 42 aa, Artificial Sequence
  Synthetic
CKGGNNACAAAVCDCDRLAAICFAGAPYNNNNYNIDLKARCQ

SEQ ID NO: 4871 - protein, 23 aa, Artificial Sequence
  Synthetic
GHDLSEWLKGCDMHVKIDPKIHP

SEQ ID NO: 4872 - protein, 34 aa, Artificial Sequence
  Synthetic
CATFISCCGRAYEVDALNSVRTSPWLLAPGNNPH

SEQ ID NO: 4873 - protein, 18 aa, Artificial Sequence
  Synthetic
CSNFCSTLSDVCQESWSG

SEQ ID NO: 4874 - protein, 18 aa, Artificial Sequence
  Synthetic
AEAQGMIGTLTSKRIKQG

SEQ ID NO: 4875 - protein, 29 aa, Artificial Sequence
  Synthetic
AEQVVQGMKEAQERLTGDAFREKHFQDEL

SEQ ID NO: 4876 - protein, 25 aa, Artificial Sequence
  Synthetic
WVGSCETGWHKCNTEHNLFHECCKQ

SEQ ID NO: 4877 - protein, 19 aa, Artificial Sequence
  Synthetic
TAFGPVSKGLRDPFEEHEE

SEQ ID NO: 4878 - protein, 25 aa, Artificial Sequence
  Synthetic
WVGSCASGWHKCNTEHNIFHECCKE

SEQ ID NO: 4879 - protein, 29 aa, Artificial Sequence
  Synthetic
ATEFCREILYLASSLREILLYDSWLISNT

SEQ ID NO: 4880 - protein, 31 aa, Artificial Sequence
  Synthetic
HLLRTLLELARTQSQRERAEQNRIIFDSVGK

SEQ ID NO: 4881 - protein, 29 aa, Artificial Sequence
  Synthetic
AQEILQRLETIAQDPSTCEICAYAACAGC

SEQ ID NO: 4882 - protein, 39 aa, Artificial Sequence
  Synthetic
QPADQAAERMQAEQHPLFDQKRRCCKFPCPDSCRYLCCG

SEQ ID NO: 4883 - protein, 27 aa, Artificial Sequence
  Synthetic
STFTRAFQAWVGLVIVIAAADGISSAI

SEQ ID NO: 4884 - protein, 30 aa, Artificial Sequence
  Synthetic
ETACRHAKSLGNCRTSQKYRANCAKTCELC

SEQ ID NO: 4885 - protein, 29 aa, Artificial Sequence
  Synthetic
SAVYYCARDAQYVVNCHDWTTALMTGLTT

SEQ ID NO: 4886 - protein, 28 aa, Artificial Sequence
  Synthetic
ASSIFKTLRTIANDDCELCVNVACTGCL

SEQ ID NO: 4887 - protein, 15 aa, Artificial Sequence
  Synthetic
GDTGCAQVLEFSKPI

SEQ ID NO: 4888 - protein, 38 aa, Artificial Sequence
  Synthetic
DKVREFFNRVKESDIPAKTRNWFSETLQKVKEKLRIES

SEQ ID NO: 4889 - protein, 38 aa, Artificial Sequence; identical to SEQ ID NO: 4888
  Synthetic

SEQ ID NO: 4890 - protein, 38 aa, Artificial Sequence; identical to SEQ ID NO: 4888
  Synthetic

SEQ ID NO: 4891 - protein, 27 aa, Artificial Sequence
  Synthetic
QCCSTFCNPVTNMCIDWLGIGLSRSVL

SEQ ID NO: 4892 - protein, 27 aa, Artificial Sequence
  Synthetic
QCCSTFCNPVTNMCIDWLGIGLSRSVL

SEQ ID NO: 4893 - protein, 22 aa, Artificial Sequence
  Synthetic
ATECCEKMCTMEDITTKCCPSR

SEQ ID NO: 4894 - protein, 37 aa, Artificial Sequence
  Synthetic
RECTKFLGGCSEDSECCPHLGCKDVLYYCAWDGTFGK

SEQ ID NO: 4895 - protein, 37 aa, Artificial Sequence; identical to SEQ ID NO: 4894
  Synthetic

SEQ ID NO: 4896 - protein, 37 aa, Artificial Sequence; identical to SEQ ID NO: 4894
  Synthetic

SEQ ID NO: 4897 - protein, 39 aa, Artificial Sequence
  Synthetic
DSFVQVYQECCKKEMGLREYCEEIYTELPIRSGLWQPNK

SEQ ID NO: 4898 - protein, 33 aa, Artificial Sequence
  Synthetic
EAARCLKKAAYNLEYAVYPDFLCGAEYPTCAYN

SEQ ID NO: 4899 - protein, 14 aa, Artificial Sequence
  Synthetic
RGYEIGHGYGQRAY

SEQ ID NO: 4900 - protein, 19 aa, Artificial Sequence
  Synthetic
LGKCYTAGCSCSWPVCYRN

SEQ ID NO: 4901 - protein, 25 aa, Artificial Sequence
  Synthetic
FYGGCGGNANNFETRDECRQTCGGK

SEQ ID NO: 4902 - protein, 14 aa, Artificial Sequence
  Synthetic
LFDAIGNLLGGLGL

SEQ ID NO: 4903 - protein, 20 aa, Artificial Sequence
  Synthetic
AAYTCCSNACNLNTKKCVLS

SEQ ID NO: 4904 - protein, 12 aa, Artificial Sequence
  Synthetic
GLLDALSGILGL

SEQ ID NO: 4905 - protein, 35 aa, Artificial Sequence
  Synthetic
VARCGQKVPDLPSVPEEKQLPPTGKESPGTEPPSH

SEQ ID NO: 4906 - protein, 38 aa, Artificial Sequence
  Synthetic
GSEIIENAVDFILRSMSRGSSFMELEGDPGQQPSKVTS

SEQ ID NO: 4907 - protein, 41 aa, Artificial Sequence
  Synthetic
MKNFTTYLSTAPVVATGWFIVTAALLIEINRFFPDPLVFSF

SEQ ID NO: 4908 - protein, 26 aa, Artificial Sequence
  Synthetic
SVGNWISNLLSPVDTSGVAPPAVNEN

SEQ ID NO: 4909 - protein, 11 aa, Artificial Sequence
  Synthetic
QWCDGACDCCS

SEQ ID NO: 4910 - protein, 20 aa, Artificial Sequence
  Synthetic
GGGMMRGAGAAGGGAAGPGM

SEQ ID NO: 4911 - protein, 29 aa, Artificial Sequence
  Synthetic
KYAMKAWDNMMNIITPRPIAACTAQKVNT

SEQ ID NO: 4912 - protein, 40 aa, Artificial Sequence
  Synthetic
YPTGCTTCCTGYKGCYYFGTNGKFVCEGESDEPKPYMSTA

SEQ ID NO: 4913 - protein, 30 aa, Artificial Sequence
  Synthetic
NELLEEISAAVAGSGPTGAGSGEPSVFGKH

SEQ ID NO: 4914 - protein, 20 aa, Artificial Sequence
  Synthetic
VASVAAEMMQHVYCAASRRC

SEQ ID NO: 4915 - protein, 19 aa, Artificial Sequence
  Synthetic
ECNQWCTGGCSSVKGNCES

SEQ ID NO: 4916 - protein, 25 aa, Artificial Sequence
  Synthetic
RKVLYGLSYCCQHFIHLNINKRESE

SEQ ID NO: 4917 - protein, 31 aa, Artificial Sequence
  Synthetic
VDAAGDRFARSVQFLKNLTPGSELFAVEKNE

SEQ ID NO: 4918 - protein, 32 aa, Artificial Sequence
  Synthetic
DELINIIDGVLRDDDKNNDGYIDYAEFAKSLQ

SEQ ID NO: 4919 - protein, 32 aa, Artificial Sequence; identical to SEQ ID NO: 4918
  Synthetic

SEQ ID NO: 4920 - protein, 18 aa, Artificial Sequence
  Synthetic
VQGCKEALDELGLFPLEF

SEQ ID NO: 4921 - protein, 30 aa, Artificial Sequence
  Synthetic
CATYGQKCRTWSPPNCCWNLRCKAFRCRPR

SEQ ID NO: 4922 - protein, 11 aa, Artificial Sequence
  Synthetic
YTAVADCCHQA

SEQ ID NO: 4923 - protein, 33 aa, Artificial Sequence
  Synthetic
VEDVVDDAGDVVEDAVDGTPAENVVDDGPFDLD

SEQ ID NO: 4924 - protein, 30 aa, Artificial Sequence
  Synthetic
HVREMFSNVFNSIKTQREQAMAANGSQPTD

SEQ ID NO: 4925 - protein, 25 aa, Artificial Sequence
  Synthetic
TGYALYTAFGKPSKELRDPFEEHED

SEQ ID NO: 4926 - protein, 31 aa, Artificial Sequence
  Synthetic
MKYMGSFLRKAATTNLFNSIKKRKVQNRAMS

SEQ ID NO: 4927 - protein, 22 aa, Artificial Sequence
  Synthetic
FDSGRECCGSFACRFGCVPCCV

SEQ ID NO: 4928 - protein, 33 aa, Artificial Sequence
  Synthetic
NVAEKIASKVAEAADVVKTIVADTDDGQEHNEL

SEQ ID NO: 4929 - protein, 31 aa, Artificial Sequence
  Synthetic
WSGFVKRLTNYLATTGHGTNTGGPVLTRRFG

SEQ ID NO: 4930 - protein, 28 aa, Artificial Sequence
  Synthetic
AFAIFSRLAQNFAPRAIFSLLPYHSVSC

SEQ ID NO: 4931 - protein, 34 aa, Artificial Sequence
  Synthetic
VDSMCRSVMRVCDEESISDKTLGDEEVRAKGKEL

SEQ ID NO: 4932 - protein, 19 aa, Artificial Sequence
  Synthetic
ECSQWCTAGCNSITSKCDT

SEQ ID NO: 4933 - protein, 21 aa, Artificial Sequence
  Synthetic
ACYVASTCCSNACNLNSNKCV

SEQ ID NO: 4934 - protein, 23 aa, Artificial Sequence
  Synthetic
LNTAGGLLGDLLGSLGSLSGGES

SEQ ID NO: 4935 - protein, 25 aa, Artificial Sequence
  Synthetic
FYGGCGGNANNFETRDECRQTCGGK

SEQ ID NO: 4936 - protein, 25 aa, Artificial Sequence
  Synthetic
FYGGCGGNANNFETRDECRQTCGGK

SEQ ID NO: 4937 - protein, 34 aa, Artificial Sequence
  Synthetic
QKGKDGCDTAYETVKCYIAVNGKFIWEEIIVLLG

SEQ ID NO: 4938 - protein, 31 aa, Artificial Sequence
  Synthetic
FGRMESLLTSLRGSAESPAALGEASAAHPLE

SEQ ID NO: 4939 - protein, 30 aa, Artificial Sequence
  Synthetic
EKVASAVSEAAEAAKTFIADTDDVDGHEEL

SEQ ID NO: 4940 - protein, 23 aa, Artificial Sequence
  Synthetic
NELLEELSAAGGASAEPNVFGKH

SEQ ID NO: 4941 - protein, 23 aa, Artificial Sequence
  Synthetic
NELLEELSAAGGASAEPNVFGKH

SEQ ID NO: 4942 - protein, 23 aa, Artificial Sequence
  Synthetic
NELLEELSAAGGASAEPNVFGKH

SEQ ID NO: 4943 - protein, 34 aa, Artificial Sequence
  Synthetic
GGECERMADTCCPGLQCLGCNPFNKENLGKCKCQ

SEQ ID NO: 4944 - protein, 30 aa, Artificial Sequence; identical to SEQ ID NO: 4939
  Synthetic

SEQ ID NO: 4945 - protein, 18 aa, Artificial Sequence
  Synthetic
MKCCRNGCGKMACTTPKF

SEQ ID NO: 4946 - protein, 17 aa, Artificial Sequence
  Synthetic
ITECCQLMSGCAVEIKS

SEQ ID NO: 4947 - protein, 26 aa, Artificial Sequence
  Synthetic
LSHLLARIWKPYKKRETPDCFWKYCV

SEQ ID NO: 4948 - protein, 12 aa, Artificial Sequence
  Synthetic
YEEVASSLCGLK

SEQ ID NO: 4949 - protein, 12 aa, Artificial Sequence
  Synthetic
YEEVASSLCGLK

SEQ ID NO: 4950 - protein, 12 aa, Artificial Sequence
  Synthetic
YEEVASSLCGLK

SEQ ID NO: 4951 - protein, 14 aa, Artificial Sequence
  Synthetic
AVYTPVASCCRKKK

SEQ ID NO: 4952 - protein, 32 aa, Artificial Sequence
  Synthetic
DEIANVVDSVLKDMDLDGDGFIDYTEYATKML

SEQ ID NO: 4953 - protein, 32 aa, Artificial Sequence; identical to SEQ ID NO: 4952
  Synthetic

SEQ ID NO: 4954 - protein, 29 aa, Artificial Sequence
  Synthetic
AEQVVQGMKEAQERLTGDAFREKHLEDEL

SEQ ID NO: 4955 - protein, 25 aa, Artificial Sequence
  Synthetic
SHYYASLCHYLNVVTRQWWEGADMW

SEQ ID NO: 4956 - protein, 35 aa, Artificial Sequence
  Synthetic
AFHNAPKLAQTMTCTFEVYNIPWRNFISLEKSSCT

SEQ ID NO: 4957 - protein, 34 aa, Artificial Sequence
  Synthetic
SGYCQWAGRYGNACWCIDLPDKVPIRISGSCRGR

SEQ ID NO: 4958 - protein, 16 aa, Artificial Sequence
  Synthetic
AGAAGVALAGALAFLI

SEQ ID NO: 4959 - protein, 30 aa, Artificial Sequence
  Synthetic
MRELISNAADALEKIRFLSLSDESVLNDEK

SEQ ID NO: 4960 - protein, 24 aa, Artificial Sequence
  Synthetic
IYGGCYGNANNFKTIDECKRTCAA

SEQ ID NO: 4961 - protein, 24 aa, Artificial Sequence
  Synthetic
IYGGCYGNANNFKTIDECKRTCAA

SEQ ID NO: 4962 - protein, 30 aa, Artificial Sequence; identical to SEQ ID NO: 4939
  Synthetic

SEQ ID NO: 4963 - protein, 17 aa, Artificial Sequence
  Synthetic
QWCTAGCNSITSKCDTL

SEQ ID NO: 4964 - protein, 13 aa, Artificial Sequence
  Synthetic
KGRAIAGTCCKRE

SEQ ID NO: 4965 - protein, 34 aa, Artificial Sequence
  Synthetic
VSYFASKIARVLEDRYSEFAKQMADVVDKEGKYY

SEQ ID NO: 4966 - protein, 23 aa, Artificial Sequence
  Synthetic
ERILSLVEEILSEVRFARGRFLW

SEQ ID NO: 4967 - protein, 37 aa, Artificial Sequence
  Synthetic
EELDKWMNSMNRNADYECLPTLKEEKEPNPSPSDNES

SEQ ID NO: 4968 - protein, 32 aa, Artificial Sequence
  Synthetic
SAVNRIGTILESWVRWDLAVLGDAYDSDDVNE

SEQ ID NO: 4969 - protein, 19 aa, Artificial Sequence
  Synthetic
HASNAIDRAVRLLYDRSLC

SEQ ID NO: 4970 - protein, 25 aa, Artificial Sequence
  Synthetic
IPEAIARAVAWLESHPPAPEHPRHH

SEQ ID NO: 4971 - protein, 25 aa, Artificial Sequence
  Synthetic
IPEAIARAVAWLESHPPAPEHPRHH

SEQ ID NO: 4972 - protein, 37 aa, Artificial Sequence
  Synthetic
IAAVVDVIRELGICPDDAAVIPIKNNRFYTTETLEVE

SEQ ID NO: 4973 - protein, 27 aa, Artificial Sequence
  Synthetic
ADNANRILRTLWNLRGCCEDKTCCFIG

SEQ ID NO: 4974 - protein, 27 aa, Artificial Sequence
  Synthetic
ADNANRILRTLWNLRGCCEDKTCCFIG

SEQ ID NO: 4975 - protein, 27 aa, Artificial Sequence
  Synthetic
ADNANRILRTLWNLRGCCEDKTCCFIG

SEQ ID NO: 4976 - protein, 12 aa, Artificial Sequence
  Synthetic
ENAVEFARELAN

SEQ ID NO: 4977 - protein, 33 aa, Artificial Sequence
  Synthetic
SGYCQWGGRYGNACWCIKLPDRVPIRVPGKCHR

SEQ ID NO: 4978 - protein, 37 aa, Artificial Sequence
  Synthetic
IAAVVDVIQELGICPDDAAVIPIKNNRFYTTEILKVE

SEQ ID NO: 4979 - protein, 37 aa, Artificial Sequence
  Synthetic
AALASFYDNAKRTLQRHWAKSLCCPEDAWCCSHDEGK

SEQ ID NO: 4980 - protein, 29 aa, Artificial Sequence
  Synthetic
CTSWLATCTDASQCCTGVCYKRAYCALWE

SEQ ID NO: 4981 - protein, 31 aa, Artificial Sequence
  Synthetic
RDAGNVLDHGFQRRRECPPWCPTSHCNAGTC

SEQ ID NO: 4982 - protein, 25 aa, Artificial Sequence
  Synthetic
IYGGCGGNGNKFPTQEACMKRCAKA

SEQ ID NO: 4983 - protein, 25 aa, Artificial Sequence
  Synthetic
IYGGCGGNGNKFPTQEACMKRCAKA

SEQ ID NO: 4984 - protein, 25 aa, Artificial Sequence
  Synthetic
IYGGCGGNGNKFPTQEACMKRCGKA

SEQ ID NO: 4985 - protein, 41 aa, Artificial Sequence
  Synthetic
ITQAVACAKKIVSQQGITAWVAWKNKCRNRDLTSYVKGCGV

SEQ ID NO: 4986 - protein, 36 aa, Artificial Sequence
  Synthetic
GGYGGYGRGYGGYGRGYGGYGRGMWGRPYGGYGWGK

SEQ ID NO: 4987 - protein, 32 aa, Artificial Sequence
  Synthetic
DELISIIDGVLRDDDKNNDGYIDYAEFAKSLQ

SEQ ID NO: 4988 - protein, 22 aa, Artificial Sequence
  Synthetic
QLVKEFVDLLTYAARTALMRNG

SEQ ID NO: 4989 - protein, 21 aa, Artificial Sequence
  Synthetic
TVLKQFSNCMAELQAKDNTTC

SEQ ID NO: 4990 - protein, 21 aa, Artificial Sequence
  Synthetic
SAAAAASSVAAGKKGYKRPSY

SEQ ID NO: 4991 - protein, 27 aa, Artificial Sequence
  Synthetic
NIIDSISDVAKQICCEITVQCCVLDEE

SEQ ID NO: 4992 - protein, 35 aa, Artificial Sequence
  Synthetic
DLVTKFLNNAFTAAQAAQTSEGTLESLQYYFIVRI

SEQ ID NO: 4993 - protein, 24 aa, Artificial Sequence
  Synthetic
LGTLAEELSSYSRRKGGFSFRFGR

SEQ ID NO: 4994 - protein, 24 aa, Artificial Sequence
  Synthetic
LGTLAEELSSYSRRKGGFSFRFGR

SEQ ID NO: 4995 - protein, 40 aa, Artificial Sequence
  Synthetic
AACDSLADTVFNTVWTLGCRPFMNSQRAACICAEEEKEEL

SEQ ID NO: 4996 - protein, 37 aa, Artificial Sequence
  Synthetic
EELDKWMNSMNRNADFECLPTLKEEKESNHNPSDSES

SEQ ID NO: 4997 - protein, 22 aa, Artificial Sequence
  Synthetic
EAADELRKMVEEVANGDVGKAN

SEQ ID NO: 4998 - protein, 25 aa, Artificial Sequence
  Synthetic
TGYALYTAFGKPSKQLRDPFEEHED

SEQ ID NO: 4999 - protein, 42 aa, Artificial Sequence; identical to SEQ ID NO: 4670
  Synthetic

SEQ ID NO: 5000 - protein, 11 aa, Artificial Sequence
  Synthetic
QWCDGACDCCS

SEQ ID NO: 5001 - protein, 42 aa, Artificial Sequence
  Synthetic
ECFHDCITEGYDDGSCVPGPTTAKCGIITKTTNKICYSFAFE

SEQ ID NO: 5002 - protein, 24 aa, Artificial Sequence
  Synthetic
CGAHCLALGRRGGYCNSKSVCVCR

SEQ ID NO: 5003 - protein, 32 aa, Artificial Sequence
  Synthetic
KYLTSFGSNFGGILTIDLSFYWALGVALTGSK

SEQ ID NO: 5004 - protein, 23 aa, Artificial Sequence
  Synthetic
VVALVSAFVTGILALRLGRELYR

SEQ ID NO: 5005 - protein, 35 aa, Artificial Sequence
  Synthetic
THICTCLTDLCNNANVHAFKTEMIIFSLIIVKQFM

SEQ ID NO: 5006 - protein, 34 aa, Artificial Sequence
  Synthetic
WHVITDMFKNAFPFINWDFFPKVKGLRSAAPDSQ

SEQ ID NO: 5007 - protein, 29 aa, Artificial Sequence
  Synthetic
VKSAISEAAEAVKTALADTDGDGQEHNEL

SEQ ID NO: 5008 - protein, 34 aa, Artificial Sequence
  Synthetic
KDLCNGAAGAGHSPWALAGGLLLSLGPALLWAGP

SEQ ID NO: 5009 - protein, 42 aa, Artificial Sequence; identical to SEQ ID NO: 4870
  Synthetic

SEQ ID NO: 5010 - protein, 42 aa, Artificial Sequence; identical to SEQ ID NO: 4870
  Synthetic

SEQ ID NO: 5011 - protein, 20 aa, Artificial Sequence
  Synthetic
EYVDTYYSAVCGRYFCCRSR

SEQ ID NO: 5012 - protein, 21 aa, Artificial Sequence
  Synthetic
INGMENLVTNFQYFLPFDVPV

SEQ ID NO: 5013 - protein, 38 aa, Artificial Sequence
  Synthetic
RTCQGMGESCSSNYDCCGSLCCAGASLFNGCVMGFVAC

SEQ ID NO: 5014 - protein, 25 aa, Artificial Sequence
  Synthetic
NVFGKVIADAIEYNYTQVGMTQTHS

SEQ ID NO: 5015 - protein, 31 aa, Artificial Sequence
  Synthetic
RDAGNVLDHGFQRRRDCPPWCPTSHCNAGTC

SEQ ID NO: 5016 - protein, 17 aa, Artificial Sequence
  Synthetic
VHHMADELLRNGPDTVI

SEQ ID NO: 5017 - protein, 24 aa, Artificial Sequence
  Synthetic
HVAKTLCSEVSDHCKSSVFQHSEL

SEQ ID NO: 5018 - protein, 32 aa, Artificial Sequence
  Synthetic
KQAGKLMNEAVEHLEYHATSKDGYEPYERGIN

SEQ ID NO: 5019 - protein, 11 aa, Artificial Sequence
  Synthetic
QWCDGACDCCA

SEQ ID NO: 5020 - protein, 35 aa, Artificial Sequence
  Synthetic
GTWCHTYANRCQVRITEEELMKQREKILGRKGKDY

SEQ ID NO: 5021 - protein, 40 aa, Artificial Sequence
  Synthetic
AECVGDGQRCADWAGPYCCSGYYCSCRSMPYCRCRSDSGK

SEQ ID NO: 5022 - protein, 38 aa, Artificial Sequence
  Synthetic
ADCVGDGQRCADWAGPYCCSGYYCSCRSMPYCRCRSDS

SEQ ID NO: 5023 - protein, 38 aa, Artificial Sequence; identical to SEQ ID NO: 5022
  Synthetic

SEQ ID NO: 5024 - protein, 19 aa, Artificial Sequence
  Synthetic
ILAAAATALTCLLPGLWSG

SEQ ID NO: 5025 - protein, 16 aa, Artificial Sequence
  Synthetic
GYPAAYRHYFGRRRNK

SEQ ID NO: 5026 - protein, 27 aa, Artificial Sequence
  Synthetic
CAAECLKAYKNGKGTCWQKFCQCVYDC

SEQ ID NO: 5027 - protein, 14 aa, Artificial Sequence
  Synthetic
AWVQEYVADLKLKA

SEQ ID NO: 5028 - protein, 39 aa, Artificial Sequence
  Synthetic
DKARAAIEHIKQKEIMIKTRNWFSETLNKMKEKLKTTFA

SEQ ID NO: 5029 - protein, 41 aa, Artificial Sequence
  Synthetic
MENFQKYLSTAPVLLTIWLTFTAGFIIEINRFFPDLLGLYF

SEQ ID NO: 5030 - protein, 34 aa, Artificial Sequence
  Synthetic
YTNANAGLAAGLPGKCGVNIPYKISPSTDCKSIK

SEQ ID NO: 5031 - protein, 39 aa, Artificial Sequence
  Synthetic
EDAKAAMTELKSCIDGLQPMHKAELVKLLVQVLGSQDGA

SEQ ID NO: 5032 - protein, 18 aa, Artificial Sequence
  Synthetic
FVAVAARVFAHGAATLSQ

SEQ ID NO: 5033 - protein, 13 aa, Artificial Sequence
  Synthetic
DWVQDYMNKLELN

SEQ ID NO: 5034 - protein, 15 aa, Artificial Sequence
  Synthetic
NEAGKRCEDAIGLLV

SEQ ID NO: 5035 - protein, 17 aa, Artificial Sequence
  Synthetic
VIDAARRAAQRMNHCGP

SEQ ID NO: 5036 - protein, 27 aa, Artificial Sequence
  Synthetic
NIIDSISDVAKQICCQITVDCCVLDEE

SEQ ID NO: 5037 - protein, 27 aa, Artificial Sequence
  Synthetic
KCIEFCSSMGTADGQCNNENLCCCTHE

SEQ ID NO: 5038 - protein, 33 aa, Artificial Sequence
  Synthetic
SGYCQWVGKYGNGCWCKELPDNVPIRVPGKCHR

SEQ ID NO: 5039 - protein, 28 aa, Artificial Sequence
  Synthetic
DCLRAGFQKGGQCGSPCIPCPVKCCCQK

SEQ ID NO: 5040 - protein, 29 aa, Artificial Sequence
  Synthetic
AEEILERLETIAQDPSTCEICAYAACAGC

SEQ ID NO: 5041 - protein, 29 aa, Artificial Sequence
  Synthetic
AEEILERLETIAQDPSTCEICAYAACAGC

SEQ ID NO: 5042 - protein, 24 aa, Artificial Sequence
  Synthetic
VAETAHEAADKVYEVEEEAKEAVG

SEQ ID NO: 5043 - protein, 33 aa, Artificial Sequence
  Synthetic
ILTKVPDAAKSIAQGYIDDLNETLAEVVAYYTS

SEQ ID NO: 5044 - protein, 32 aa, Artificial Sequence
  Synthetic
DELVSIIDGVLRDDDKNNDGYIDYAEFAKSLQ

SEQ ID NO: 5045 - protein, 21 aa, Artificial Sequence
  Synthetic
FQAFVAVAARVFGHGAATLTP

SEQ ID NO: 5046 - protein, 25 aa, Artificial Sequence
  Synthetic
IYGGCGGNGNKFPTQEACMKRCAKA

SEQ ID NO: 5047 - protein, 33 aa, Artificial Sequence
  Synthetic
ETIRDIYSKGSAAISTYTGILTDQILTMLQGKQ

SEQ ID NO: 5048 - protein, 29 aa, Artificial Sequence
  Synthetic
VVTLLGAAASYFKLNNRRNCFRTHEPENV

SEQ ID NO: 5049 - protein, 23 aa, Artificial Sequence
  Synthetic
LNEVLSAFFDVEEPPEKGCIICF

SEQ ID NO: 5050 - protein, 24 aa, Artificial Sequence
  Synthetic
LTNFGQRMDAIIPGNCSNIVCSPK

SEQ ID NO: 5051 - protein, 41 aa, Artificial Sequence
  Synthetic
GRTLAKELEALREAKSHRPLIALPTQDPATHGGASSKASSD

SEQ ID NO: 5052 - protein, 41 aa, Artificial Sequence
  Synthetic
GRTLAKELEALREAKSHRPLIALPTQDPATHGGASSEASSD

SEQ ID NO: 5053 - protein, 42 aa, Artificial Sequence
  Synthetic
CKGGNDACAAAVCDCDRLAAICFAGAPYNDNNYNIDLKARCQ

SEQ ID NO: 5054 - protein, 30 aa, Artificial Sequence
  Synthetic
WRYIRGCADTCPVGKPYEMIECCSTDKCNR

SEQ ID NO: 5055 - protein, 24 aa, Artificial Sequence
  Synthetic
DEIFNSAKELVESAEVSKVHTSQV

SEQ ID NO: 5056 - protein, 17 aa, Artificial Sequence
  Synthetic
GYNAAYNRYFRQRPGAK

SEQ ID NO: 5057 - protein, 37 aa, Artificial Sequence
  Synthetic
DAAFRKFEALCSARSQQPSTSKPSLIDALCTSALKKE

SEQ ID NO: 5058 - protein, 26 aa, Artificial Sequence
  Synthetic
VKFMATVVQTGFVYWVGRVTKDIDVE

SEQ ID NO: 5059 - protein, 16 aa, Artificial Sequence
  Synthetic
MNKGGTLFEALVIKKQ

SEQ ID NO: 5060 - protein, 13 aa, Artificial Sequence
  Synthetic
GQDLSSYLAGCGL

SEQ ID NO: 5061 - protein, 32 aa, Artificial Sequence
  Synthetic
MASGVGGGSEGGPDDVKNSYIRVNGEPEIVYQ

SEQ ID NO: 5062 - protein, 15 aa, Artificial Sequence
  Synthetic
QCCDHFCSTATSTCI

SEQ ID NO: 5063 - protein, 23 aa, Artificial Sequence
  Synthetic
FTTCFKEAFAEVKPQIPKANLDE

SEQ ID NO: 5064 - protein, 29 aa, Artificial Sequence
  Synthetic
VKSAISEAAEAVKTALADSDGDGQEHNEL

SEQ ID NO: 5065 - protein, 29 aa, Artificial Sequence
  Synthetic
VKSAISEAAEAVKTALADSDGDGQEHNEL

SEQ ID NO: 5066 - protein, 39 aa, Artificial Sequence
  Synthetic
GDDVVSNYFTKGKRGKRLGILVVFSFIKEAILPSRQKIY

SEQ ID NO: 5067 - protein, 14 aa, Artificial Sequence
  Synthetic
LLDVVGNLLGGLGL

SEQ ID NO: 5068 - protein, 29 aa, Artificial Sequence
  Synthetic
RYDACVNACLEHHPNVRECEEACKNPVPP

SEQ ID NO: 5069 - protein, 42 aa, Artificial Sequence
  Synthetic
ESFQEFFGRGHEDTMADQEANRHGRSGKDPNYYRPPGLPAKY

SEQ ID NO: 5070 - protein, 39 aa, Artificial Sequence
  Synthetic
LSELNSACDDAWETCAWSRTCCSRNCCRGICVSRYYECP

SEQ ID NO: 5071 - protein, 13 aa, Artificial Sequence
  Synthetic
LLGGGGGGGGGLL

SEQ ID NO: 5072 - protein, 21 aa, Artificial Sequence
  Synthetic
LQAFVAVAARVFAHGAATLSP

SEQ ID NO: 5073 - protein, 20 aa, Artificial Sequence
  Synthetic
VIHIVDKVLEYVEEVVLGGR

SEQ ID NO: 5074 - protein, 41 aa, Artificial Sequence
  Synthetic
MNDFQKYLSTAPVLLTLWMTFTAGFIIEVNRFFPDMLGLYF

SEQ ID NO: 5075 - protein, 31 aa, Artificial Sequence
  Synthetic
EQLENGGTSLSEKTVLLLVTPFLAAAWSLHP

SEQ ID NO: 5076 - protein, 31 aa, Artificial Sequence
  Synthetic
GHCRSWYNDCCDGYYCSCMQPPNCICRNNNG

SEQ ID NO: 5077 - protein, 15 aa, Artificial Sequence
  Synthetic
ADTISNGLSAIFCAA

SEQ ID NO: 5078 - protein, 13 aa, Artificial Sequence
  Synthetic
VHDVSSYVEGCKL

SEQ ID NO: 5079 - protein, 13 aa, Artificial Sequence
  Synthetic
AFGNEYITYIENQ

SEQ ID NO: 5080 - protein, 13 aa, Artificial Sequence
  Synthetic
AFGNEYITYIENQ

SEQ ID NO: 5081 - protein, 40 aa, Artificial Sequence
  Synthetic
GGYGGYGRGMYGGYGRGMYGGYGRGMYGGYGRGMYGGWGK

SEQ ID NO: 5082 - protein, 34 aa, Artificial Sequence
  Synthetic
AATAIFRKLAGERNYTDEMVAMLPRQEECTVDEV

SEQ ID NO: 5083 - protein, 29 aa, Artificial Sequence
  Synthetic
RCGGWMAKCADSDDCCETFHCTRFNVCGK

SEQ ID NO: 5084 - protein, 29 aa, Artificial Sequence
  Synthetic
RCGGWMAKCADSDDCCETFHCTRFNVCGK

SEQ ID NO: 5085 - protein, 29 aa, Artificial Sequence
  Synthetic
RCGGWMAKCADSDDCCETFHCTRFNVCGK

SEQ ID NO: 5086 - protein, 13 aa, Artificial Sequence
  Synthetic
LKTAYRRIYGITI

SEQ ID NO: 5087 - protein, 32 aa, Artificial Sequence
  Synthetic
NAMESVVEKLESMLNFSVSDSPGGTFFEGTGH

SEQ ID NO: 5088 - protein, 31 aa, Artificial Sequence
  Synthetic
DEIPKIVEEILYTATFTVLMAIDDLRLRDAT

SEQ ID NO: 5089 - protein, 34 aa, Artificial Sequence
  Synthetic
WHVLTDMFKKALPFINWEFFPKVKGLRSAVPDSQ

SEQ ID NO: 5090 - protein, 26 aa, Artificial Sequence
  Synthetic
WSKIKEAAKTAGKMAMGFVNDMVGEQ

SEQ ID NO: 5091 - protein, 22 aa, Artificial Sequence
  Synthetic
QDAVSSMNTVVESVRLLGWIEK

SEQ ID NO: 5092 - protein, 34 aa, Artificial Sequence
  Synthetic
ANTVLERVEGAQQRWKLQVQEQRKTVFDRHKMLS

SEQ ID NO: 5093 - protein, 34 aa, Artificial Sequence; identical to SEQ ID NO: 5092
  Synthetic

SEQ ID NO: 5094 - protein, 33 aa, Artificial Sequence
  Synthetic
EALEEFKKLVQHKGLSEEDIFMPLQTGSCVLEH

SEQ ID NO: 5095 - protein, 13 aa, Artificial Sequence
  Synthetic
LKTAYKRIYGITI

SEQ ID NO: 5096 - protein, 13 aa, Artificial Sequence
  Synthetic
LKTAYKRIYGITI

SEQ ID NO: 5097 - protein, 38 aa, Artificial Sequence
  Synthetic
GGYHGGGGSCYHYCHGRCCSAAEAKALEATTAQVKPQN

SEQ ID NO: 5098 - protein, 13 aa, Artificial Sequence
  Synthetic
DWVQEYMDDLELN

SEQ ID NO: 5099 - protein, 25 aa, Artificial Sequence
  Synthetic
INELHELANQCDPDAHHDHPHCHPH

SEQ ID NO: 5100 - protein, 21 aa, Artificial Sequence
  Synthetic
IDIIEKLLNEADLSILIIVIC

SEQ ID NO: 5101 - protein, 23 aa, Artificial Sequence
  Synthetic
YSGCGGNANRFKTIEECRRTCVG

SEQ ID NO: 5102 - protein, 42 aa, Artificial Sequence
  Synthetic
EAFQEFFGRGHEDTIADQEANRHGRSGKDPNYYRPPGLPDKY

SEQ ID NO: 5103 - protein, 41 aa, Artificial Sequence
  Synthetic
MNDLQKYLSTAPVLLTLWMTFTAGFIIEINRFFPDMLGLYF

SEQ ID NO: 5104 - protein, 28 aa, Artificial Sequence
  Synthetic
AVKKYLAAVLGKRYRQRYRNKGRRLGYL

SEQ ID NO: 5105 - protein, 17 aa, Artificial Sequence
  Synthetic
VIDAARRAAQRMNHCGP

SEQ ID NO: 5106 - protein, 27 aa, Artificial Sequence
  Synthetic
SDFTKGFQAWVALVLVIAAADGVASSL

SEQ ID NO: 5107 - protein, 25 aa, Artificial Sequence
  Synthetic
SACDIASEFIKCLSRQKECPVFEFP

SEQ ID NO: 5108 - protein, 30 aa, Artificial Sequence
  Synthetic
ARCGGWMAKCADSDDCCEAFHCTRFNVCGK

SEQ ID NO: 5109 - protein, 33 aa, Artificial Sequence
  Synthetic
KIAETVASAVSEAAEAAETVVADTDDVQGHNEL

SEQ ID NO: 5110 - protein, 14 aa, Artificial Sequence
  Synthetic
VSSALDAAATATGN

SEQ ID NO: 5111 - protein, 11 aa, Artificial Sequence
  Synthetic
GWCDGGCDCCQ

SEQ ID NO: 5112 - protein, 37 aa, Artificial Sequence
  Synthetic
IAAVIDVIQELGICPDDAAVIPIKNNRFYTTEILEVE

SEQ ID NO: 5113 - protein, 31 aa, Artificial Sequence; identical to SEQ ID NO: 4880
  Synthetic

SEQ ID NO: 5114 - protein, 31 aa, Artificial Sequence; identical to SEQ ID NO: 4880
  Synthetic

SEQ ID NO: 5115 - protein, 42 aa, Artificial Sequence
  Synthetic
CTTCCTGYTDCYYFGKDGKFVCEGESIEPKACTLECDSRLHT

SEQ ID NO: 5116 - protein, 37 aa, Artificial Sequence
  Synthetic
AEQVTRVITGVPWYSTRLRPAISSALSKDGIYTAIPK

SEQ ID NO: 5117 - protein, 29 aa, Artificial Sequence
  Synthetic
RCRSAYEDCCDGYYCNCSQPPYCLCRNNN

SEQ ID NO: 5118 - protein, 30 aa, Artificial Sequence
  Synthetic
LSGIMSNLGTVGNMVGGFCCTVYSGCCSEK

SEQ ID NO: 5119 - protein, 22 aa, Artificial Sequence
  Synthetic
AEKALDVVEKVASIAAAGATLG

SEQ ID NO: 5120 - protein, 12 aa, Artificial Sequence
  Synthetic
NVLGRCGSGLHV

SEQ ID NO: 5121 - protein, 40 aa, Artificial Sequence
  Synthetic
TDCVGDGQRCADWAGPYCCSGYYCSCRSMPYCRCRSDSGK

SEQ ID NO: 5122 - protein, 32 aa, Artificial Sequence
  Synthetic
LLDTLKNMATNAAKGAGVSVLKALSCKLFKTC

SEQ ID NO: 5123 - protein, 22 aa, Artificial Sequence
  Synthetic
GGVSELVAPVGAVVGALAVALM

SEQ ID NO: 5124 - protein, 29 aa, Artificial Sequence
  Synthetic
KRGCREGGEFCGTLYEERCCSGWCFFVCV

SEQ ID NO: 5125 - protein, 29 aa, Artificial Sequence
  Synthetic
KRGCREGGEFCGTLYEERCCSGWCFFVCV

SEQ ID NO: 5126 - protein, 25 aa, Artificial Sequence
  Synthetic
ASVIRGVIETAVFAGKILHKRDDGQ

SEQ ID NO: 5127 - protein, 23 aa, Artificial Sequence
  Synthetic
DAFRECLKLFTPRRHTRHLRQKY

SEQ ID NO: 5128 - protein, 21 aa, Artificial Sequence
  Synthetic
LQAFVAVAARVFAHGAATLTP

SEQ ID NO: 5129 - protein, 38 aa, Artificial Sequence
  Synthetic
LSYGHQGCSQLCIPMKLFNPSVIVEYKCCHDSPLCNKF

SEQ ID NO: 5130 - protein, 42 aa, Artificial Sequence
  Synthetic
DAVSAVASVVQDEMKVIDDVQQLEKDKQQLKDDIGFLTGERE

SEQ ID NO: 5131 - protein, 22 aa, Artificial Sequence
  Synthetic
GAIGKFMNVLRRSGCPWDPWCG

SEQ ID NO: 5132 - protein, 29 aa, Artificial Sequence
  Synthetic
AEEILQRLEAIAQDPNTCEICAYAACTGC

SEQ ID NO: 5133 - protein, 29 aa, Artificial Sequence
  Synthetic
AEEILQRLEAIAQDPNTCEICAYAACTGC

SEQ ID NO: 5134 - protein, 29 aa, Artificial Sequence
  Synthetic
AEEILQRLEAIAQDPNTCEICAYAACTGC

SEQ ID NO: 5135 - protein, 32 aa, Artificial Sequence
  Synthetic
AQVAQQLTAMCGLQLQQPGPCPCNAAAGGVYY

SEQ ID NO: 5136 - protein, 27 aa, Artificial Sequence
  Synthetic
KANQACTKGGNPGTCGFQYDLCLCLRN

SEQ ID NO: 5137 - protein, 34 aa, Artificial Sequence
  Synthetic
AQKAARLAAAAAALAAKTAADAAAKAAAIAAAAA

SEQ ID NO: 5138 - protein, 30 aa, Artificial Sequence
  Synthetic
DDCGKLFSGCDTNADCCEGYVCRLWCKLDW

SEQ ID NO: 5139 - protein, 42 aa, Artificial Sequence
  Synthetic
GAQFASYGSAWLMPYSEGRGKRGIVDECCLRPCSVDVLLSYC

SEQ ID NO: 5140 - protein, 12 aa, Artificial Sequence
  Synthetic
GLQCCQKYVAVA

SEQ ID NO: 5141 - protein, 15 aa, Artificial Sequence
  Synthetic
QCCNEFCSTATRTCI

SEQ ID NO: 5142 - protein, 15 aa, Artificial Sequence
  Synthetic
QCCNEFCSTATRTCI

SEQ ID NO: 5143 - protein, 31 aa, Artificial Sequence
  Synthetic
GSIPACGESCFKGKCYTPGCSCSKYPLCAKN

SEQ ID NO: 5144 - protein, 34 aa, Artificial Sequence
  Synthetic
SGYCQWASKYGNACWCYKLPDDARIMKPGRCNGG

SEQ ID NO: 5145 - protein, 33 aa, Artificial Sequence
  Synthetic
DLCNGVAQAGLSPWALAGGLLLSLGPALLWAGP

SEQ ID NO: 5146 - protein, 33 aa, Artificial Sequence
  Synthetic
NLAEKVANAASEAAEAAKTFVADSDDMDGHEEL

SEQ ID NO: 5147 - protein, 35 aa, Artificial Sequence
  Synthetic
RGYGGYGGYGRGMYGGYGRGMYGGYGRGMYGGWGK

SEQ ID NO: 5148 - protein, 16 aa, Artificial Sequence
  Synthetic
WMDFGKRAIEDVDYEY

SEQ ID NO: 5149 - protein, 13 aa, Artificial Sequence
  Synthetic
LKSLTSGAQQATT

SEQ ID NO: 5150 - protein, 33 aa, Artificial Sequence
  Synthetic
CGSDYITYGNKCKLCTEILRSNGKIQFLHEGHC

SEQ ID NO: 5151 - protein, 13 aa, Artificial Sequence
  Synthetic
SWVQEYVDDLELN

SEQ ID NO: 5152 - protein, 28 aa, Artificial Sequence
  Synthetic
GDCTGWLDGCTSPAECCTAVCDATCKLW

SEQ ID NO: 5153 - protein, 13 aa, Artificial Sequence
  Synthetic
QYSHLGGNWARNK

SEQ ID NO: 5154 - protein, 17 aa, Artificial Sequence
  Synthetic
KCCRNGCGKVSCVTPNF

SEQ ID NO: 5155 - protein, 35 aa, Artificial Sequence
  Synthetic
GVVAAVVAAVAGAVSSFVAYQRRRLCFREGGSAPV

SEQ ID NO: 5156 - protein, 24 aa, Artificial Sequence
  Synthetic
DEMVQRVQDVLQSAALDAIHKREG

SEQ ID NO: 5157 - protein, 30 aa, Artificial Sequence
  Synthetic
DDCGGLFSGCDSNADCCEGYVCRLWCKYKL

SEQ ID NO: 5158 - protein, 15 aa, Artificial Sequence
  Synthetic
LISAATAVFALLVLT

SEQ ID NO: 5159 - protein, 28 aa, Artificial Sequence
  Synthetic
DEMNTVLDNLATRDFINWLLHTKITDSL

SEQ ID NO: 5160 - protein, 35 aa, Artificial Sequence
  Synthetic
FKTMFHHAFEYASDASPDYRQLLQDALDKGLSAFK

SEQ ID NO: 5161 - protein, 39 aa, Artificial Sequence
  Synthetic
AGELLQQLREISATKIRFARQHQEAEREPRPMYPRRRKT

SEQ ID NO: 5162 - protein, 33 aa, Artificial Sequence
  Synthetic
DKAKEAATKAYEAAKKHVATAADKVKDWAASSK

SEQ ID NO: 5163 - protein, 28 aa, Artificial Sequence
  Synthetic
AVKKYLAAVLGKRYKQRVKNKGRRVAYL

SEQ ID NO: 5164 - protein, 14 aa, Artificial Sequence
  Synthetic
EWVQKYVSDLELSA

SEQ ID NO: 5165 - protein, 14 aa, Artificial Sequence
  Synthetic
EWVQKYVSDLELSA

SEQ ID NO: 5166 - protein, 14 aa, Artificial Sequence
  Synthetic
EWVQKYVSDLELSA

SEQ ID NO: 5167 - protein, 25 aa, Artificial Sequence
  Synthetic
KGFLSGLLNVADSVCCKVDTSCCSN

SEQ ID NO: 5168 - protein, 25 aa, Artificial Sequence
  Synthetic
IYGGCGGNANNFETRDQCRHTCGGK

SEQ ID NO: 5169 - protein, 37 aa, Artificial Sequence
  Synthetic
KVFTQIKGLVAENLVILEQMEKCEPESFYELPSRPSE

SEQ ID NO: 5170 - protein, 36 aa, Artificial Sequence
  Synthetic
VETLCTKIVSYGIDKLIEKILEGGSAKLICGLIHAC

SEQ ID NO: 5171 - protein, 24 aa, Artificial Sequence
  Synthetic
LTNFGQRMDAIIPGNCSNIVCSPK

SEQ ID NO: 5172 - protein, 24 aa, Artificial Sequence
  Synthetic
LTNFGQRMDAIIPGNCSNIVCSSK

SEQ ID NO: 5173 - protein, 21 aa, Artificial Sequence
  Synthetic
YCVHTMIDGVDYVVCDKITVY

SEQ ID NO: 5174 - protein, 15 aa, Artificial Sequence
  Synthetic
QCCDDFCSTATSTCV

SEQ ID NO: 5175 - protein, 37 aa, Artificial Sequence
  Synthetic
TQLKKLVDTLPQKTRMNIMKLSEIILTSPLCNQDLSV

SEQ ID NO: 5176 - protein, 29 aa, Artificial Sequence
  Synthetic
DDCGTLFSGCDTSKDCCEGYVCHLWCKYK

SEQ ID NO: 5177 - protein, 14 aa, Artificial Sequence
  Synthetic
VEIASEGVKRAIGS

SEQ ID NO: 5178 - protein, 33 aa, Artificial Sequence
  Synthetic
CGTDMNTYGNECTLCMKIREDGSHINIIKDEPC

SEQ ID NO: 5179 - protein, 28 aa, Artificial Sequence
  Synthetic
GINGLGAVGSWCLRSRRLPCRCPRLVNT

SEQ ID NO: 5180 - protein, 23 aa, Artificial Sequence
  Synthetic
LFYYFVEAATEAASKPLVLWLNG

SEQ ID NO: 5181 - protein, 29 aa, Artificial Sequence
  Synthetic
IAQEARSLADRLCSEKSGLCGTPANHTEL

SEQ ID NO: 5182 - protein, 34 aa, Artificial Sequence
  Synthetic
DAESIARTVMNEFDENRDGRLSAAEFDKALLGPR

SEQ ID NO: 5183 - protein, 11 aa, Artificial Sequence
  Synthetic
EWAQGGLEWAE

SEQ ID NO: 5184 - protein, 37 aa, Artificial Sequence
  Synthetic
GGGGGARRLKGLAKKRAGNGCFGLKLDRIGSMSGLGC

SEQ ID NO: 5185 - protein, 28 aa, Artificial Sequence
  Synthetic
TEAITVFEKLAEEAHGFAHFIDNSECFP

SEQ ID NO: 5186 - protein, 25 aa, Artificial Sequence
  Synthetic
IYGGCGGNGNKFPTEKACMKRCAKA

SEQ ID NO: 5187 - protein, 24 aa, Artificial Sequence
  Synthetic
TVVYFLYYIMSPLTSKIWDKILNQ

SEQ ID NO: 5188 - protein, 24 aa, Artificial Sequence
  Synthetic
TVVYFLYYIMSPLTSKIWDKILNQ

SEQ ID NO: 5189 - protein, 32 aa, Artificial Sequence
  Synthetic
ESLKTAARTAVEQATVITNQVQQSVQQAANAH

SEQ ID NO: 5190 - protein, 21 aa, Artificial Sequence
  Synthetic
QSMLTAIDDLLQALNFNSVTV

SEQ ID NO: 5191 - protein, 20 aa, Artificial Sequence
  Synthetic
AHNCLNKGDTYDKLHDGECK

SEQ ID NO: 5192 - protein, 39 aa, Artificial Sequence
  Synthetic
ATFGDRANGFCDYSTSTSPGGECTCVYHCPPVVPHESHL

SEQ ID NO: 5193 - protein, 23 aa, Artificial Sequence
  Synthetic
YSGCGGNANRFRTIDECNRTCVG

SEQ ID NO: 5194 - protein, 27 aa, Artificial Sequence
  Synthetic
ADDANRILQTLWNLRGCCEDKTCCFIG

SEQ ID NO: 5195 - protein, 40 aa, Artificial Sequence
  Synthetic
AGDGFNIAKQAMDQLTNGQAAGLGRIDANYQQVATSNCGL

SEQ ID NO: 5196 - protein, 23 aa, Artificial Sequence
  Synthetic
FYQSCVDQLNGVYEEKDTPPVKE

SEQ ID NO: 5197 - protein, 19 aa, Artificial Sequence
  Synthetic
STVIYRLQDVFNHWQICTV

SEQ ID NO: 5198 - protein, 18 aa, Artificial Sequence
  Synthetic
GYNAAYNRYFRQRRGAKY

SEQ ID NO: 5199 - protein, 28 aa, Artificial Sequence
  Synthetic
DEMNTILDNLAARDFINWLIQTKITDRK

SEQ ID NO: 5200 - protein, 20 aa, Artificial Sequence
  Synthetic
ECNQWCTGGCNPTQGKCDTA

SEQ ID NO: 5201 - protein, 26 aa, Artificial Sequence
  Synthetic
AEEVADDAAQGVEDVQKSADDVVDEA

SEQ ID NO: 5202 - protein, 30 aa, Artificial Sequence
  Synthetic
HNLASPISAWIDPSHYCCCGGGCTDDCVNC

SEQ ID NO: 5203 - protein, 33 aa, Artificial Sequence
  Synthetic
AATVAESVLNSVKSMNDEYHATIEEDQVISISS

SEQ ID NO: 5204 - protein, 12 aa, Artificial Sequence
  Synthetic
LWTLLQGGVHFM

SEQ ID NO: 5205 - protein, 39 aa, Artificial Sequence
  Synthetic
VSKATDCIEAGNYCGPTVMKICCGFCSPYSKICMNYPKN

SEQ ID NO: 5206 - protein, 39 aa, Artificial Sequence; identical to SEQ ID NO: 5205
  Synthetic

SEQ ID NO: 5207 - protein, 34 aa, Artificial Sequence
  Synthetic
RVAECFKDACNKSGLAPSMELILAEFIMESEADK

SEQ ID NO: 5208 - protein, 39 aa, Artificial Sequence
  Synthetic
AGELLQQLRGISAANIRFARRQQEAIRAPRPTPSRRRKR

SEQ ID NO: 5209 - protein, 23 aa, Artificial Sequence
  Synthetic
SGVAKKLNSAVDFRALARVLLKQ

SEQ ID NO: 5210 - protein, 32 aa, Artificial Sequence
  Synthetic
RQCADLGEECYTRFCCPGLRCKDLQVPTCLLA

SEQ ID NO: 5211 - protein, 39 aa, Artificial Sequence
  Synthetic
VSKAADCIEAGNYCGPTVMKLCCGFCSPYSKICMNYPKN

SEQ ID NO: 5212 - protein, 21 aa, Artificial Sequence
  Synthetic
SGGSGAAGGVGNLFSGILGGL

SEQ ID NO: 5213 - protein, 40 aa, Artificial Sequence
  Synthetic
YGGYGRGYGGYGGYGRGYGGYGRGMYGGYGRPYGGYGWGK

SEQ ID NO: 5214 - protein, 27 aa, Artificial Sequence
  Synthetic
ERVWEMCDYIWQNVTIPDVEPSDNWDV

SEQ ID NO: 5215 - protein, 22 aa, Artificial Sequence
  Synthetic
NQGSGFCDSIGNTSLCKCQYNC

SEQ ID NO: 5216 - protein, 18 aa, Artificial Sequence
  Synthetic
VGSCGSGLKSCCVRNRWA

SEQ ID NO: 5217 - protein, 23 aa, Artificial Sequence
  Synthetic
GHCIAKGFKGGYCNDKAVCVCRN

SEQ ID NO: 5218 - protein, 42 aa, Artificial Sequence
  Synthetic
CLKSAAGAISGINLGKAAGLPSTCGVNIPYKISPSTDCSKVQ

SEQ ID NO: 5219 - protein, 31 aa, Artificial Sequence
  Synthetic
EKIASVASEAAEAVKIAVADTDGGSQEHEEL

SEQ ID NO: 5220 - protein, 30 aa, Artificial Sequence
  Synthetic
EAAQRVAKAASKIAEAKQVDAEILKKEVYI

SEQ ID NO: 5221 - protein, 24 aa, Artificial Sequence
  Synthetic
IYGGCYGNANNFKTIDECKRTCAA

SEQ ID NO: 5222 - protein, 24 aa, Artificial Sequence
  Synthetic
IYGGCYGNANNFKTIDECKRTCAA

SEQ ID NO: 5223 - protein, 41 aa, Artificial Sequence
  Synthetic
GGLVATLQSLGAGGSSVITGNIGALMGYATHKYLDSEEDEE

SEQ ID NO: 5224 - protein, 14 aa, Artificial Sequence
  Synthetic
DWVQEYITDLELNA

SEQ ID NO: 5225 - protein, 40 aa, Artificial Sequence; identical to SEQ ID NO: 4912
  Synthetic

SEQ ID NO: 5226 - protein, 41 aa, Artificial Sequence
  Synthetic
AAVTHLSQAISSVVAQVLPSAHIDAWEYCMAYIAAGIGAGL

SEQ ID NO: 5227 - protein, 41 aa, Artificial Sequence
  Synthetic
AAEAMGKFKQCFLNQSHRTLKNFGLMMHTVYDSIWCNMKSN

SEQ ID NO: 5228 - protein, 34 aa, Artificial Sequence
  Synthetic
SFISSMKTCVSKLSSPSLYVSFYVFALFVVVFIL

SEQ ID NO: 5229 - protein, 36 aa, Artificial Sequence
  Synthetic
AEVKGLLGQLEELAWNLPPGPFSPIPDLLGDGDDRF

SEQ ID NO: 5230 - protein, 18 aa, Artificial Sequence
  Synthetic
GRHAGAKCMNGKCHCSKI

SEQ ID NO: 5231 - protein, 37 aa, Artificial Sequence; identical to SEQ ID NO: 5116
  Synthetic

SEQ ID NO: 5232 - protein, 37 aa, Artificial Sequence; identical to SEQ ID NO: 5116
  Synthetic

SEQ ID NO: 5233 - protein, 15 aa, Artificial Sequence
  Synthetic
ADTIKNGFSAIFCAG

SEQ ID NO: 5234 - protein, 17 aa, Artificial Sequence
  Synthetic
FYSIASEAVYAVENPEH

SEQ ID NO: 5235 - protein, 14 aa, Artificial Sequence
  Synthetic
TCVKVLQSAAESRP

SEQ ID NO: 5236 - protein, 26 aa, Artificial Sequence
  Synthetic
WVTSCATGWHKCNSENELFHECCKQG

SEQ ID NO: 5237 - protein, 19 aa, Artificial Sequence
  Synthetic
TRAVSTLLQFATTVAGLIM

SEQ ID NO: 5238 - protein, 21 aa, Artificial Sequence
  Synthetic
LTGIKNAMSYIPSLLMGQEMK

SEQ ID NO: 5239 - protein, 25 aa, Artificial Sequence
  Synthetic
TGYAVYTAFGQPSKKLRDPFEEHED

SEQ ID NO: 5240 - protein, 25 aa, Artificial Sequence
  Synthetic
TGYTIYTAFGQPSKQLRDPFEEHED

SEQ ID NO: 5241 - protein, 35 aa, Artificial Sequence
  Synthetic
NGCDTIIEECKTSMVERCQNQEFESAAGSTTLGPQ

SEQ ID NO: 5242 - protein, 40 aa, Artificial Sequence
  Synthetic
SGIITPGGRLIQLPHGVSIILEGPSAALLSNGDFVTYESS

SEQ ID NO: 5243 - protein, 16 aa, Artificial Sequence
  Synthetic
IDEGGRGVCAIVPEHV

SEQ ID NO: 5244 - protein, 21 aa, Artificial Sequence
  Synthetic
RVKGLLASVAERENGHRTFKK

SEQ ID NO: 5245 - protein, 25 aa, Artificial Sequence
  Synthetic
TGYALYTAFGEPSKELRDPFEEHED

SEQ ID NO: 5246 - protein, 29 aa, Artificial Sequence
  Synthetic
AEQVVQGMKEAQVRLTGDAFREKHFQDEL

SEQ ID NO: 5247 - protein, 25 aa, Artificial Sequence
  Synthetic
TGYAIYTSFGRPSEQLRDPFEDHED

SEQ ID NO: 5248 - protein, 34 aa, Artificial Sequence
  Synthetic
KALEDFYRFINRERFVERRIITPRQTEACTSENA

SEQ ID NO: 5249 - protein, 25 aa, Artificial Sequence
  Synthetic
TGYAIYTSFGRPSEQLKDPFEDHED

SEQ ID NO: 5250 - protein, 31 aa, Artificial Sequence
  Synthetic
SGPGGMKNWVEWKLHCLGRPLSYWMTGCHLG

SEQ ID NO: 5251 - protein, 14 aa, Artificial Sequence
  Synthetic
KEFNGGAGGFRAAR

SEQ ID NO: 5252 - protein, 35 aa, Artificial Sequence
  Synthetic
ALQSLLDSAQTFAETDNNGASIFNGIRKLRTEHDK

SEQ ID NO: 5253 - protein, 23 aa, Artificial Sequence
  Synthetic
LNEVLSAFFDVEEPQEKGCIICF

SEQ ID NO: 5254 - protein, 38 aa, Artificial Sequence
  Synthetic
GDLVEGGCEKLLVLSDSNLPPFDKSPLLTQNREPVLLD

SEQ ID NO: 5255 - protein, 30 aa, Artificial Sequence
  Synthetic
RGVHGCDSYCKTKNFDYGYCRQEHCCCVNY

SEQ ID NO: 5256 - protein, 27 aa, Artificial Sequence
  Synthetic
QMTAAADQCWDDLPCPASHKSVCAMTF

SEQ ID NO: 5257 - protein, 15 aa, Artificial Sequence
  Synthetic
ADTIKNGFSAIFCAG

SEQ ID NO: 5258 - protein, 25 aa, Artificial Sequence
  Synthetic
CNYASTLINSVITTAVCVFAVFIFL

SEQ ID NO: 5259 - protein, 24 aa, Artificial Sequence
  Synthetic
DYFHTLVNNWLANNPYLGTGADRD

SEQ ID NO: 5260 - protein, 32 aa, Artificial Sequence
  Synthetic
RGMWGECKDGLTTCLAPSECCSEDCEGSCTMW

SEQ ID NO: 5261 - protein, 29 aa, Artificial Sequence
  Synthetic
KAINGAQRLAEKAEDAAAASTDAINSAAF

SEQ ID NO: 5262 - protein, 37 aa, Artificial Sequence
  Synthetic
AKAAMTELKSCRDGLQPMHKAELVKLLVQVLGSQDGA

SEQ ID NO: 5263 - protein, 23 aa, Artificial Sequence
  Synthetic
IYGYCGSGAAYCGAGNCRCQCRG

SEQ ID NO: 5264 - protein, 28 aa, Artificial Sequence
  Synthetic
RDGCSNAGGFCGIHPGLCCSEICLVWCT

SEQ ID NO: 5265 - protein, 27 aa, Artificial Sequence
  Synthetic
DSCAEEGEECCSDLRCMTSGAGAICVT

SEQ ID NO: 5266 - protein, 34 aa, Artificial Sequence
  Synthetic
TSAMDQLTNGMAVELGRVQATYEEADPSHCASGV

SEQ ID NO: 5267 - protein, 38 aa, Artificial Sequence
  Synthetic
KAMQGVFEYYKSVTFVSNCGSHPSTTSKGSPINTQYVF

SEQ ID NO: 5268 - protein, 15 aa, Artificial Sequence
  Synthetic
QCCDDFCSTATSTCI

SEQ ID NO: 5269 - protein, 15 aa, Artificial Sequence
  Synthetic
QCCDDFCSTATSTCI

SEQ ID NO: 5270 - protein, 34 aa, Artificial Sequence
  Synthetic
KDILYYCDSAAQHIGGDELNYYCKQNGAGDSVAW

SEQ ID NO: 5271 - protein, 28 aa, Artificial Sequence
  Synthetic
HQADAAAAAATKTANNPTDAKLAGAGSP

SEQ ID NO: 5272 - protein, 41 aa, Artificial Sequence
  Synthetic
YETCLQYVDRAWIHYSDSEFCGCTNPEQESAFRDAMDCLQF

SEQ ID NO: 5273 - protein, 42 aa, Artificial Sequence
  Synthetic
TFGAGGPRLVNTLGGSSPTTKRVIYIVMILLVLITLAVNLKH

SEQ ID NO: 5274 - protein, 42 aa, Artificial Sequence; identical to SEQ ID NO: 5273
  Synthetic

SEQ ID NO: 5275 - protein, 25 aa, Artificial Sequence
  Synthetic
TGYALYTAFGQPSRELRDPFEEHED

SEQ ID NO: 5276 - protein, 25 aa, Artificial Sequence
  Synthetic
TGYALYTAFGQPSRELRDPFEEHED

SEQ ID NO: 5277 - protein, 24 aa, Artificial Sequence
  Synthetic
EAMNLLTYMLHGLSRRKHILRWLE

SEQ ID NO: 5278 - protein, 31 aa, Artificial Sequence
  Synthetic
RAFAATLVTAAECNLSSVQAPGVRLVLLADG

SEQ ID NO: 5279 - protein, 39 aa, Artificial Sequence
  Synthetic
AGDLLQKLRDISAAKLQFVRLRPELTREAIPAHSRRRKR

SEQ ID NO: 5280 - protein, 25 aa, Artificial Sequence
  Synthetic
TGYALYTAFGQPSKQLRDPFEDHED

SEQ ID NO: 5281 - protein, 25 aa, Artificial Sequence
  Synthetic
TGYALYTAFGQPSKQLRDPFEDHED

SEQ ID NO: 5282 - protein, 25 aa, Artificial Sequence
  Synthetic
TGYALYTAFGQPSKELRDPFEEHED

SEQ ID NO: 5283 - protein, 25 aa, Artificial Sequence
  Synthetic
TGYALYTAFGQPSKELRDPFEEHED

SEQ ID NO: 5284 - protein, 25 aa, Artificial Sequence
  Synthetic
TGYALYTAFGQPSKELRDPFEEHED

SEQ ID NO: 5285 - protein, 25 aa, Artificial Sequence
  Synthetic
TGYALYTAFGQPSKELRDPFEEHED

SEQ ID NO: 5286 - protein, 25 aa, Artificial Sequence
  Synthetic
TGYALYTAFGQPSKELRDPFEEHED

SEQ ID NO: 5287 - protein, 25 aa, Artificial Sequence
  Synthetic
TGYALYTAFGQPSKELRDPFEEHED

SEQ ID NO: 5288 - protein, 25 aa, Artificial Sequence
  Synthetic
TGYALYTAFGQPSKELRDPFEEHED

SEQ ID NO: 5289 - protein, 25 aa, Artificial Sequence
  Synthetic
TGYALYTAFGQPSKELRDPFEEHED

SEQ ID NO: 5290 - protein, 25 aa, Artificial Sequence
  Synthetic
TGYALYTAFGQPSKELRDPFEEHED

SEQ ID NO: 5291 - protein, 25 aa, Artificial Sequence
  Synthetic
TGYALYTAFGQPSKELRDPFEEHED

SEQ ID NO: 5292 - protein, 25 aa, Artificial Sequence
  Synthetic
TGYALYTAFGQPSKELRDPFEEHED

SEQ ID NO: 5293 - protein, 41 aa, Artificial Sequence
  Synthetic
HWVGGGGTSVSSFKGMFFVRHCIYELVFVCVWESMSNWLQK

SEQ ID NO: 5294 - protein, 27 aa, Artificial Sequence
  Synthetic
TGAGSSLAGCIAGPNGLLFTVGAGASV

SEQ ID NO: 5295 - protein, 33 aa, Artificial Sequence
  Synthetic
VKRACHTCDDGTECCDSRCSCPWNTCTCIPWGK

SEQ ID NO: 5296 - protein, 39 aa, Artificial Sequence
  Synthetic
DLIRAALEDADTKNDPRLLGLVTGACCAVLKFSFCCGKK

SEQ ID NO: 5297 - protein, 42 aa, Artificial Sequence
  Synthetic
NVLRALRRLGSSKMMRDSRCFGRRLDRIGSLSGLGCNVLRRH

SEQ ID NO: 5298 - protein, 26 aa, Artificial Sequence
  Synthetic
DNAKRILQTLRNTRSCCPEEPCCFWR

SEQ ID NO: 5299 - protein, 37 aa, Artificial Sequence
  Synthetic
DRASDGGNAAASDLIALTIKGCCSRPPCALSNPDYCG

SEQ ID NO: 5300 - protein, 27 aa, Artificial Sequence
  Synthetic
DNAKRFLQTLRNTRSCCPEEITCCPWG

SEQ ID NO: 5301 - protein, 33 aa, Artificial Sequence; identical to SEQ ID NO: 5150
  Synthetic

SEQ ID NO: 5302 - protein, 42 aa, Artificial Sequence
  Synthetic
SALGNLEGVMEASLYSTEVVTLTRLQKSLYVMLQQLDLIHGC

SEQ ID NO: 5303 - protein, 16 aa, Artificial Sequence
  Synthetic
LLNLLAGLGAMGARRP

SEQ ID NO: 5304 - protein, 33 aa, Artificial Sequence
  Synthetic
SGYCQWGGRYGNACWCIKLPDDVPIRVPGKCHR

SEQ ID NO: 5305 - protein, 31 aa, Artificial Sequence
  Synthetic
HLLRNMIEMARNENQREQAGLNRKYLDEVGK

SEQ ID NO: 5306 - protein, 29 aa, Artificial Sequence
  Synthetic
ADEVQEVADDAGQAVEDAEKSADDVVDEA

SEQ ID NO: 5307 - protein, 33 aa, Artificial Sequence
  Synthetic
SGYCQWGGKYGNACWCIKLPDDVPIRVPGKCHR

SEQ ID NO: 5308 - protein, 24 aa, Artificial Sequence
  Synthetic
IYGGCYGNANNFKTIDECEPPCAA

SEQ ID NO: 5309 - protein, 25 aa, Artificial Sequence
  Synthetic
TGYALYTSFGRPSEGLIDPFDNHED

SEQ ID NO: 5310 - protein, 18 aa, Artificial Sequence
  Synthetic
QYGNQYVSQYSAPRSSGY

SEQ ID NO: 5311 - protein, 36 aa, Artificial Sequence
  Synthetic
ADQVTRVITGVPWYSSRLKPAISSALSADGIYTIAN

SEQ ID NO: 5312 - protein, 42 aa, Artificial Sequence
  Synthetic
CLKSAASSFTDLDLGKAASLPSTCNVNIPYKISPSTDCSKVQ

SEQ ID NO: 5313 - protein, 12 aa, Artificial Sequence
  Synthetic
GLLDGLLGTLGL

SEQ ID NO: 5314 - protein, 12 aa, Artificial Sequence
  Synthetic
GLLDGLLGTLGL

SEQ ID NO: 5315 - protein, 12 aa, Artificial Sequence
  Synthetic
GLLDGLLGTLGL

SEQ ID NO: 5316 - protein, 12 aa, Artificial Sequence
  Synthetic
GLLDGLLGTLGL

SEQ ID NO: 5317 - protein, 35 aa, Artificial Sequence
  Synthetic
AACHSILTSCRVDTDCCAGLKCGIFDEDALCVPQG

SEQ ID NO: 5318 - protein, 33 aa, Artificial Sequence
  Synthetic
RGCGTMWSPCSTEKPCCDNFSCQPAIKWCIWSP

SEQ ID NO: 5319 - protein, 19 aa, Artificial Sequence
  Synthetic
EEYQKMLENLREAEVKKNA

SEQ ID NO: 5320 - protein, 36 aa, Artificial Sequence
  Synthetic
AEQVTRVITGVPWYSTRLRPAISSALSKDGIYTIAN

SEQ ID NO: 5321 - protein, 20 aa, Artificial Sequence
  Synthetic
LAEEAKTLAAALLEEEIMDN

SEQ ID NO: 5322 - protein, 29 aa, Artificial Sequence
  Synthetic
TDYSDCIHEAIKTNYCTKPQKSYVVGFSI

SEQ ID NO: 5323 - protein, 29 aa, Artificial Sequence
  Synthetic
TDYSDCIHEAIKTNYCTKPQKSYMVGFSI

SEQ ID NO: 5324 - protein, 19 aa, Artificial Sequence
  Synthetic
GGSCIGFIDQGYMCVCKVG

SEQ ID NO: 5325 - protein, 33 aa, Artificial Sequence
  Synthetic
SGGSALMAKIGAFLGYTVHKQVESRQKESKEKK

SEQ ID NO: 5326 - protein, 41 aa, Artificial Sequence
  Synthetic
GGLVATLQSLGAGGSSVVIGNIGALMGYATHKYLDSEEDEE

SEQ ID NO: 5327 - protein, 40 aa, Artificial Sequence
  Synthetic
EIVKQLLTRGTLKDADFWKRLEMQGCVCNANAKFCCGEGR

SEQ ID NO: 5328 - protein, 42 aa, Artificial Sequence
  Synthetic
NRISTGVSTGISTTMNARVAVLITAAILSAPVTAIALLEARR

SEQ ID NO: 5329 - protein, 37 aa, Artificial Sequence
  Synthetic
GRGYGGRGGGWGGRGGGWGRGGGGRGFYGGGRRGWGK

SEQ ID NO: 5330 - protein, 33 aa, Artificial Sequence
  Synthetic
TQAQSFLDEVIKCANSSQIVLFSMLVALVFIII

SEQ ID NO: 5331 - protein, 27 aa, Artificial Sequence
  Synthetic
CKSWEGAAHGACHVRNGKHMCFCYFNC

SEQ ID NO: 5332 - protein, 12 aa, Artificial Sequence
  Synthetic
GLLDGLLGGLGL

SEQ ID NO: 5333 - protein, 12 aa, Artificial Sequence
  Synthetic
GLLDGLLGGLGL

SEQ ID NO: 5334 - protein, 18 aa, Artificial Sequence
  Synthetic
RCHQFAEGIWQGQCVETS

SEQ ID NO: 5335 - protein, 17 aa, Artificial Sequence
  Synthetic
VTEIAQSLATCVNDEQS

SEQ ID NO: 5336 - protein, 33 aa, Artificial Sequence
  Synthetic
AERCSNFGSDCIPATHDCCSGECFGFEDMGLCT

SEQ ID NO: 5337 - protein, 40 aa, Artificial Sequence
  Synthetic
GYGGGYGGGYGDVGYGGGYSGGYSGGYSGGYGSYGHRRKY

SEQ ID NO: 5338 - protein, 11 aa, Artificial Sequence
  Synthetic
GHGGYGGGLGY

SEQ ID NO: 5339 - protein, 24 aa, Artificial Sequence
  Synthetic
IYGGCGGNANNFKTLEECESTCAA

SEQ ID NO: 5340 - protein, 39 aa, Artificial Sequence
  Synthetic
AGELLQQLRDISAAKSHFARRQQVAVRELRPTHSRRWKR

SEQ ID NO: 5341 - protein, 28 aa, Artificial Sequence
  Synthetic
DEMNTVLDSLATRDFINWLLQTKITDRK

SEQ ID NO: 5342 - protein, 31 aa, Artificial Sequence; identical to SEQ ID NO: 5075
  Synthetic

SEQ ID NO: 5343 - protein, 23 aa, Artificial Sequence
  Synthetic
GFGCYRSCWKAGHDEETCKKECS

SEQ ID NO: 5344 - protein, 12 aa, Artificial Sequence
  Synthetic
GAVSGLLTNLGL

SEQ ID NO: 5345 - protein, 40 aa, Artificial Sequence
  Synthetic
AGILTMGRRAGAEPAPRPCPGRRCPVVAVPSAAPGGRSGV

SEQ ID NO: 5346 - protein, 40 aa, Artificial Sequence
  Synthetic
AGILTMGRRAGAEPAPRPCLGRRCSAPAAASVAPGGQSGI

SEQ ID NO: 5347 - protein, 22 aa, Artificial Sequence
  Synthetic
AAVTTYAGIITDQVFSVLSGKD

SEQ ID NO: 5348 - protein, 24 aa, Artificial Sequence
  Synthetic
ATSIVNSLKTALTQRNSYKEYAII

SEQ ID NO: 5349 - protein, 37 aa, Artificial Sequence
  Synthetic
ADQVTRVITGVPWYSTRLRPAISSALSKDGIYTAVPN

SEQ ID NO: 5350 - protein, 34 aa, Artificial Sequence
  Synthetic
RAAAEECEEYCEEEEKTCCGEEDGEPVCAEFCLG

SEQ ID NO: 5351 - protein, 17 aa, Artificial Sequence
  Synthetic
KCCRNGCGKVSCVTPVF

SEQ ID NO: 5352 - protein, 32 aa, Artificial Sequence
  Synthetic
KAAKAVLDAAPADKFKLMDESFKVAVMQVIAS

SEQ ID NO: 5353 - protein, 13 aa, Artificial Sequence
  Synthetic
VGGLVGGLLGRAL

SEQ ID NO: 5354 - protein, 33 aa, Artificial Sequence
  Synthetic
VITSLFNYVNSCASSIVGSLTPSLPNCVSTGSI

SEQ ID NO: 5355 - protein, 25 aa, Artificial Sequence
  Synthetic
TGYALYTAFGQPSQKLRDPFEEHGD

SEQ ID NO: 5356 - protein, 25 aa, Artificial Sequence
  Synthetic
TGYALYTAFGQPSQKLRDPFEEHGD

SEQ ID NO: 5357 - protein, 40 aa, Artificial Sequence
  Synthetic
GNGAYASITNGGPGNQNVTIRLKSQRGHGINFVIEIYSRY

SEQ ID NO: 5358 - protein, 13 aa, Artificial Sequence
  Synthetic
VGGIVGGLLGRAL

SEQ ID NO: 5359 - protein, 32 aa, Artificial Sequence
  Synthetic
RQCADLGEECHTRFCCPGLRCEDLQVPTCLMA

SEQ ID NO: 5360 - protein, 41 aa, Artificial Sequence
  Synthetic
QNLKGAMATGSGSNLKLRRSEMPADPYHVTICKIWGEESSS

SEQ ID NO: 5361 - protein, 29 aa, Artificial Sequence
  Synthetic
CYTGYNGVGECFDDPNVPGPDNCGCRYNC

SEQ ID NO: 5362 - protein, 34 aa, Artificial Sequence
  Synthetic
TMESIVNTVANPEASTVSINTPETTTVPVSSTAA

SEQ ID NO: 5363 - protein, 31 aa, Artificial Sequence
  Synthetic
EQLENGGTSLSEKTVVLLVTLLLAAAWCLHP

SEQ ID NO: 5364 - protein, 42 aa, Artificial Sequence; identical to SEQ ID NO: 5139
  Synthetic

SEQ ID NO: 5365 - protein, 42 aa, Artificial Sequence; identical to SEQ ID NO: 5139
  Synthetic

SEQ ID NO: 5366 - protein, 40 aa, Artificial Sequence
  Synthetic
RNGHDYYGDYYQRHYDEDAAIGPHSRESFRHGASVNYNDY

SEQ ID NO: 5367 - protein, 21 aa, Artificial Sequence
  Synthetic
LRDYANRVINGGPVEAAGPPA

SEQ ID NO: 5368 - protein, 20 aa, Artificial Sequence
  Synthetic
EAAEAYGTCFRGEAKKHGLL

SEQ ID NO: 5369 - protein, 31 aa, Artificial Sequence; identical to SEQ ID NO: 5305
  Synthetic

SEQ ID NO: 5370 - protein, 34 aa, Artificial Sequence
  Synthetic
TAMAIFRKLARERNYTDEMVAVLPSQEECSVDEV

SEQ ID NO: 5371 - protein, 29 aa, Artificial Sequence
  Synthetic
TDYSDCIHEAIKTNDCTKPQKSDVVGVSI

SEQ ID NO: 5372 - protein, 28 aa, Artificial Sequence
  Synthetic
TGYALYTAFGQPSQQLRDPFEEHGNELK

SEQ ID NO: 5373 - protein, 28 aa, Artificial Sequence
  Synthetic
TGYALYTAFGQPSQQLRDPFEEHGNELK

SEQ ID NO: 5374 - protein, 29 aa, Artificial Sequence
  Synthetic
TDYSDCIHEAIKTNYCTKPQKSYVLEFSI

SEQ ID NO: 5375 - protein, 29 aa, Artificial Sequence
  Synthetic
TDYSDCIHEAIKTNYCTKPQKSYLVGFSV

SEQ ID NO: 5376 - protein, 32 aa, Artificial Sequence
  Synthetic
YGGCGGNANNFHTLEECEKVCGVRSRDSPKEN

SEQ ID NO: 5377 - protein, 36 aa, Artificial Sequence
  Synthetic
LASGFGVGSSLCAAHCIARRYRGGYCNSKAVCVCRN

SEQ ID NO: 5378 - protein, 25 aa, Artificial Sequence
  Synthetic
GGGYGGGGGYGGGYGGGYGGGKYKG

SEQ ID NO: 5379 - protein, 25 aa, Artificial Sequence
  Synthetic
RRAEEWGRSGQDPDHFRPAGLPKKY

SEQ ID NO: 5380 - protein, 15 aa, Artificial Sequence
  Synthetic
NALSVLDKIYTSPLC

SEQ ID NO: 5381 - protein, 27 aa, Artificial Sequence
  Synthetic
AANIFRALRSISQEDCELCINVACTGC

SEQ ID NO: 5382 - protein, 18 aa, Artificial Sequence
  Synthetic
KARTAVDYICSELYDKAW

SEQ ID NO: 5383 - protein, 25 aa, Artificial Sequence
  Synthetic
TGYALYTAFGQPSEQLRDPFEEHED

SEQ ID NO: 5384 - protein, 25 aa, Artificial Sequence
  Synthetic
TGYALYTAFGQPSEQLRDPFEEHED

SEQ ID NO: 5385 - protein, 25 aa, Artificial Sequence
  Synthetic
TGYALYTAFGQPSEQLRDPFEEHED

SEQ ID NO: 5386 - protein, 25 aa, Artificial Sequence
  Synthetic
TGYALYTAFGQPSEQLRDPFEEHED

SEQ ID NO: 5387 - protein, 25 aa, Artificial Sequence
  Synthetic
TGYALYTAFGQPSEQLRDPFEEHED

SEQ ID NO: 5388 - protein, 25 aa, Artificial Sequence
  Synthetic
TGYALYTAFGQPSEQLRDPFEEHED

SEQ ID NO: 5389 - protein, 25 aa, Artificial Sequence
  Synthetic
TGYALYTAFGQPSEQLRDPFEEHED

SEQ ID NO: 5390 - protein, 25 aa, Artificial Sequence
  Synthetic
TGYALYTAFGQPSEQLRDPFEEHED

SEQ ID NO: 5391 - protein, 25 aa, Artificial Sequence
  Synthetic
TGYALYTAFGQPSEQLRDPFEEHED

SEQ ID NO: 5392 - protein, 29 aa, Artificial Sequence
  Synthetic
ATSLASSIQSFASSVFLAAFFACSFIYMF

SEQ ID NO: 5393 - protein, 35 aa, Artificial Sequence
  Synthetic
RNAAAKASDLIALNARRPECCTHPACHVSNPELCG

SEQ ID NO: 5394 - protein, 13 aa, Artificial Sequence
  Synthetic
NGVYDQLGGCGAA

SEQ ID NO: 5395 - protein, 23 aa, Artificial Sequence
  Synthetic
MVALFAALFTGILALRLGTELYK

SEQ ID NO: 5396 - protein, 25 aa, Artificial Sequence
  Synthetic
KDGQTVLGTLDSKRLSPGGPDPRHH

SEQ ID NO: 5397 - protein, 42 aa, Artificial Sequence
  Synthetic
CESVAGRCIHNGCWCERSAPHGNCCNTSGCTARWWCPGTKWD

SEQ ID NO: 5398 - protein, 20 aa, Artificial Sequence
  Synthetic
TIIECAQKALTFWTYQNAQE

SEQ ID NO: 5399 - protein, 31 aa, Artificial Sequence
  Synthetic
AKSASNAASDAMEDAKDATKSWADWVKDKFD

SEQ ID NO: 5400 - protein, 16 aa, Artificial Sequence
  Synthetic
GRSGYAYCSGGGMYCN

SEQ ID NO: 5401 - protein, 27 aa, Artificial Sequence
  Synthetic
RKGFGLISQMFKLSCCADPACKHTPGC

SEQ ID NO: 5402 - protein, 31 aa, Artificial Sequence
  Synthetic
EQLESGGTSLSEKTVVLLVTPLLAAAWCLHP

SEQ ID NO: 5403 - protein, 20 aa, Artificial Sequence
  Synthetic
GNQFTALINALDCSPVNVNL

SEQ ID NO: 5404 - protein, 39 aa, Artificial Sequence
  Synthetic
DKARAAIESIKQSDIPAKTRNWFSETFHKVKEQLKTAFS

SEQ ID NO: 5405 - protein, 18 aa, Artificial Sequence
  Synthetic
RCIDEGGSGVCAIVPVLN

SEQ ID NO: 5406 - protein, 17 aa, Artificial Sequence
  Synthetic
KCCKNGCGFMTCTTARP

SEQ ID NO: 5407 - protein, 41 aa, Artificial Sequence
  Synthetic
MKDFTTYLSTAPVVAAAWFTFTAGLLIEINRFFPDPLAFSF

SEQ ID NO: 5408 - protein, 37 aa, Artificial Sequence
  Synthetic
ADQVTRVITGVPWYSTRLRPAISSALSADGIYTAVPN

SEQ ID NO: 5409 - protein, 29 aa, Artificial Sequence
  Synthetic
DCDRVAANCFAGAPYNNDNFFISFKENCQ

SEQ ID NO: 5410 - protein, 17 aa, Artificial Sequence
  Synthetic
GGGYGGGGYGGNGFFGK

SEQ ID NO: 5411 - protein, 32 aa, Artificial Sequence; identical to SEQ ID NO: 5376
  Synthetic

SEQ ID NO: 5412 - protein, 40 aa, Artificial Sequence
  Synthetic
GLYGGYGGFGGYGYRPFSYGYNPFSYGYYGFGDDDGGFDD

SEQ ID NO: 5413 - protein, 37 aa, Artificial Sequence
  Synthetic
GGGGGAQYPDGYSGRLPGGTYLHNKDCVGCSISGGGD

SEQ ID NO: 5414 - protein, 13 aa, Artificial Sequence
  Synthetic
TWVQEYVNDLELN

SEQ ID NO: 5415 - protein, 35 aa, Artificial Sequence
  Synthetic
TGGSSAAKSGSSSGAGFAPVAGAGSLAAIAGLLLL

SEQ ID NO: 5416 - protein, 41 aa, Artificial Sequence
  Synthetic
DAVGFADAVGEADPIDWKKVDWKKVSKKTCKVMLKACKFLG

SEQ ID NO: 5417 - protein, 36 aa, Artificial Sequence
  Synthetic
EEAAGLCEEGNEECVERRMLRDAHLDYIYTQKRNRP

SEQ ID NO: 5418 - protein, 41 aa, Artificial Sequence
  Synthetic
ITQAVACAKTIVSRQGITAWVAWKNKCRNRDVSSYIRGCKL

SEQ ID NO: 5419 - protein, 21 aa, Artificial Sequence
  Synthetic
ATGMCTSIPSLKDCYCMHQCP

SEQ ID NO: 5420 - protein, 35 aa, Artificial Sequence
  Synthetic
AVLSAGTRYLQWNDKKCTLLHPFLCQFQPRSEANG

SEQ ID NO: 5421 - protein, 24 aa, Artificial Sequence
  Synthetic
IYGGCYGNANNFKTIEECKRTCAA

SEQ ID NO: 5422 - protein, 37 aa, Artificial Sequence
  Synthetic
MKYFTTYLSTAPVVAVLWFTLTASLLIEINRFFPDIL

SEQ ID NO: 5423 - protein, 33 aa, Artificial Sequence
  Synthetic
CGSDYITYGNECHLCTESLKSNGRVQFLHDGSC

SEQ ID NO: 5424 - protein, 27 aa, Artificial Sequence
  Synthetic
IEDMARTFFAHFPLGSTLGFHVPYQED

SEQ ID NO: 5425 - protein, 29 aa, Artificial Sequence
  Synthetic
GGCSAGQTCCKHLVCSRRHGWCVWDGTFS

SEQ ID NO: 5426 - protein, 28 aa, Artificial Sequence
  Synthetic
GKTVRNIYDAGVIQLAGSFPGEGRDCLH

SEQ ID NO: 5427 - protein, 33 aa, Artificial Sequence
  Synthetic
SGYCQWGGKYGNACWCIKLPDSVPIRVPGKCQR

SEQ ID NO: 5428 - protein, 35 aa, Artificial Sequence
  Synthetic
RVVTEACEEYCEDRDKKTCCGLENGEPFCATLCFG

SEQ ID NO: 5429 - protein, 33 aa, Artificial Sequence
  Synthetic
DDLYAIAAHILTQPQIQAEKWGGGKIYYTKRSM

SEQ ID NO: 5430 - protein, 21 aa, Artificial Sequence
  Synthetic
SGSQAAKHLMGLAAANYAGGP

SEQ ID NO: 5431 - protein, 30 aa, Artificial Sequence
  Synthetic
SGSQAAKHLMGLAAANYAGGPGRRRRSEQA

SEQ ID NO: 5432 - protein, 21 aa, Artificial Sequence
  Synthetic
SGSQAAKHLMGLAAANYAGGP

SEQ ID NO: 5433 - protein, 21 aa, Artificial Sequence
  Synthetic
SGSQAAKHLMGLAAANYAGGP

SEQ ID NO: 5434 - protein, 25 aa, Artificial Sequence
  Synthetic
TGYALYTAFGQPSEQLRDPFEEHGD

SEQ ID NO: 5435 - protein, 25 aa, Artificial Sequence
  Synthetic
TGYALYTAFGQPSEQLRDPFEEHGD

SEQ ID NO: 5436 - protein, 28 aa, Artificial Sequence
  Synthetic
DEMNTVLDTLATRDFINWLLQTKITDRK

SEQ ID NO: 5437 - protein, 42 aa, Artificial Sequence
  Synthetic
LKSGFSCCHRYGGIGYVEGYKTVDPVTCQHESYRLDDPSQRS

SEQ ID NO: 5438 - protein, 39 aa, Artificial Sequence
  Synthetic
SCDGGGGALGHPRVYINLDKETKTGTCGYCGLQFRQQHH

SEQ ID NO: 5439 - protein, 40 aa, Artificial Sequence
  Synthetic
RNGHEYYGDYYQRHYDEDSAIGPRSPYGFRHGASVNYDDY

SEQ ID NO: 5440 - protein, 24 aa, Artificial Sequence
  Synthetic
AIASHILTQAQIQAEKWGGGKIYY

SEQ ID NO: 5441 - protein, 27 aa, Artificial Sequence
  Synthetic
AGGYCKPGNTCCCKKKDSGPVDVPPTA

SEQ ID NO: 5442 - protein, 29 aa, Artificial Sequence
  Synthetic
TKVDTMVTTLRSFVEIESSKTLCEKIYLC

SEQ ID NO: 5443 - protein, 29 aa, Artificial Sequence
  Synthetic
TDYSDCIHEAIKANYCTKPQKSYVVEFSI

SEQ ID NO: 5444 - protein, 21 aa, Artificial Sequence
  Synthetic
AAMSTYAGIFTDQLLTLLRGE

SEQ ID NO: 5445 - protein, 24 aa, Artificial Sequence
  Synthetic
IYGGCYGNANNFKTIDECERTCAA

SEQ ID NO: 5446 - protein, 24 aa, Artificial Sequence
  Synthetic
IYGGCYGNANNFKTIDECERTCAA

SEQ ID NO: 5447 - protein, 29 aa, Artificial Sequence
  Synthetic
TDYSDCIQEAVKMNYCTKPQKPHVVGLSI

SEQ ID NO: 5448 - protein, 27 aa, Artificial Sequence
  Synthetic
ASIFQALRTIAGDDCELCVNVACTGCS

SEQ ID NO: 5449 - protein, 41 aa, Artificial Sequence
  Synthetic
CATCGGHLGHVFKGEGFATPTDERHCVNSVSLKFTPAASSL

SEQ ID NO: 5450 - protein, 26 aa, Artificial Sequence
  Synthetic
YNEGCEGIAARVEVSKNPNVCSYTSN

SEQ ID NO: 5451 - protein, 27 aa, Artificial Sequence
  Synthetic
IEDMARTFFAHFPLGSTLGFHVPYQED

SEQ ID NO: 5452 - protein, 25 aa, Artificial Sequence
  Synthetic
TGYALYTAFGQPSNELRDPFEEHED

SEQ ID NO: 5453 - protein, 27 aa, Artificial Sequence
  Synthetic
AGSAGGGSAGGDGPNNSLLSEFVYNNY

SEQ ID NO: 5454 - protein, 21 aa, Artificial Sequence
  Synthetic
IKEIHDAATACDPEAHHEHDH

SEQ ID NO: 5455 - protein, 25 aa, Artificial Sequence
  Synthetic
TGGADSVAAAAAVGGPILAALALLL

SEQ ID NO: 5456 - protein, 18 aa, Artificial Sequence
  Synthetic
ISLLTSALEYAKQVLPNR

SEQ ID NO: 5457 - protein, 30 aa, Artificial Sequence
  Synthetic
RTGEDFLEECMGGCAFDFCCKRSLRDTTSD

SEQ ID NO: 5458 - protein, 25 aa, Artificial Sequence
  Synthetic
TGYALYTAFGQPSEQLRDPFEEHED

SEQ ID NO: 5459 - protein, 25 aa, Artificial Sequence
  Synthetic
TGYALYTAFGQPSEQLRDPFEEHED

SEQ ID NO: 5460 - protein, 25 aa, Artificial Sequence
  Synthetic
TGYALYTAFGQPSEQLRDPFEEHED

SEQ ID NO: 5461 - protein, 25 aa, Artificial Sequence
  Synthetic
TGYALYTAFGQPSEQLRDPFEEHED

SEQ ID NO: 5462 - protein, 22 aa, Artificial Sequence
  Synthetic
AAVSTYAGIFTDQLLSMLKGDS

SEQ ID NO: 5463 - protein, 34 aa, Artificial Sequence
  Synthetic
GVSNGGTEMIQLSHIRERQRYWAQDNLRRRFLEK

SEQ ID NO: 5464 - protein, 41 aa, Artificial Sequence
  Synthetic
GGAAAAPAKGAAAARSPMASTTAVLVVAAAVAAPLLAFFHF

SEQ ID NO: 5465 - protein, 23 aa, Artificial Sequence
  Synthetic
YGGCGGNANNFKSGGECKRACGE

SEQ ID NO: 5466 - protein, 20 aa, Artificial Sequence
  Synthetic
ANEFTGLINALSCSPINVNL

SEQ ID NO: 5467 - protein, 22 aa, Artificial Sequence
  Synthetic
GHACYRNCWREGNDEETCKERC

SEQ ID NO: 5468 - protein, 23 aa, Artificial Sequence
  Synthetic
GHACYRNCWREGNDEETCKERCG

SEQ ID NO: 5469 - protein, 30 aa, Artificial Sequence
  Synthetic
HGNAIIDRGCSTSCPGGNRPVCCSTDLCNK

SEQ ID NO: 5470 - protein, 29 aa, Artificial Sequence
  Synthetic
LSAGAGSGLAGDHLSDISEPEPELDSRRH

SEQ ID NO: 5471 - protein, 25 aa, Artificial Sequence
  Synthetic
TGYALYTAFGQPSEQLRDPFEDHED

SEQ ID NO: 5472 - protein, 22 aa, Artificial Sequence
  Synthetic
TKADQLAQQAHNNRKLLDIAGK

SEQ ID NO: 5473 - protein, 21 aa, Artificial Sequence
  Synthetic
AAVSTYAGIFTDQLLTLLKGD

SEQ ID NO: 5474 - protein, 28 aa, Artificial Sequence
  Synthetic
ACAAGAVSICGHCAPTCGCGRAGLGGYY

SEQ ID NO: 5475 - protein, 24 aa, Artificial Sequence
  Synthetic
IYGGCYGNANNFKTIEECKRTCAA

SEQ ID NO: 5476 - protein, 24 aa, Artificial Sequence
  Synthetic
IYGGCYGNANNFKTIEECKRTCAA

SEQ ID NO: 5477 - protein, 24 aa, Artificial Sequence
  Synthetic
IYGGCYGNANNFKTIEECKRTCAA

SEQ ID NO: 5478 - protein, 34 aa, Artificial Sequence
  Synthetic
GGGGSCYHYCHGRCCSAAEAKALEATTAQVKPQN

SEQ ID NO: 5479 - protein, 16 aa, Artificial Sequence
  Synthetic
IKDFVDRLKAGQVRRE

SEQ ID NO: 5480 - protein, 34 aa, Artificial Sequence
  Synthetic
ANCARKYKGYGDCRPGDRPHDKKDSLFCFCNYPC

SEQ ID NO: 5481 - protein, 28 aa, Artificial Sequence
  Synthetic
QNGIDVAQKCCSTDCSSDYIKEICCPFD

SEQ ID NO: 5482 - protein, 24 aa, Artificial Sequence
  Synthetic
IQSILSSGGKRLGCIKIAASLKGR

SEQ ID NO: 5483 - protein, 27 aa, Artificial Sequence
  Synthetic
IEDMARTFFAHFPLGSTLGFHVPYQED

SEQ ID NO: 5484 - protein, 27 aa, Artificial Sequence
  Synthetic
KRCLASGETCWRDTSCCSFSCTNNVCF

SEQ ID NO: 5485 - protein, 27 aa, Artificial Sequence
  Synthetic
KRCLASGETCWRDTSCCSFSCTNNVCF

SEQ ID NO: 5486 - protein, 20 aa, Artificial Sequence
  Synthetic
ERLAYEATSIVNDVNLDHAY

SEQ ID NO: 5487 - protein, 25 aa, Artificial Sequence
  Synthetic
TGYALYTAFGQPSQQLRDPFEEHGD

SEQ ID NO: 5488 - protein, 25 aa, Artificial Sequence
  Synthetic
TGYALYTAFGQPSQQLRDPFEEHGD

SEQ ID NO: 5489 - protein, 25 aa, Artificial Sequence
  Synthetic
TGYALYTAFGQPSQQLRDPFEEHGD

SEQ ID NO: 5490 - protein, 25 aa, Artificial Sequence
  Synthetic
TGYALYTAFGQPSQQLRDPFEEHGD

SEQ ID NO: 5491 - protein, 25 aa, Artificial Sequence
  Synthetic
TGYALYTAFGQPSQQLRDPFEEHGD

SEQ ID NO: 5492 - protein, 25 aa, Artificial Sequence
  Synthetic
TGYALYTAFGQPSQQLRDPFEEHGD

SEQ ID NO: 5493 - protein, 25 aa, Artificial Sequence
  Synthetic
TGYALYTAFGQPSQQLRDPFEEHGD

SEQ ID NO: 5494 - protein, 25 aa, Artificial Sequence
  Synthetic
TGYALYTAFGQPSQQLRDPFEEHGD

SEQ ID NO: 5495 - protein, 25 aa, Artificial Sequence
  Synthetic
TGYALYTAFGQPSQQLRDPFEEHGD

SEQ ID NO: 5496 - protein, 25 aa, Artificial Sequence
  Synthetic
TGYALYTAFGQPSQQLRDPFEEHGD

SEQ ID NO: 5497 - protein, 25 aa, Artificial Sequence
  Synthetic
TGYALYTAFGQPSQQLRDPFEEHGD

SEQ ID NO: 5498 - protein, 25 aa, Artificial Sequence
  Synthetic
TGYALYTAFGQPSQQLRDPFEEHGD

SEQ ID NO: 5499 - protein, 25 aa, Artificial Sequence
  Synthetic
TGYALYTAFGQPSQQLRDPFEEHGD

SEQ ID NO: 5500 - protein, 25 aa, Artificial Sequence
  Synthetic
TGYALYTAFGQPSQQLRDPFEEHGD

SEQ ID NO: 5501 - protein, 25 aa, Artificial Sequence
  Synthetic
TGYALYTAFGQPSQQLRDPFEEHGD

SEQ ID NO: 5502 - protein, 25 aa, Artificial Sequence
  Synthetic
TGYALYTAFGQPSQQLRDPFEEHGD

SEQ ID NO: 5503 - protein, 25 aa, Artificial Sequence
  Synthetic
TGYALYTAFGQPSQQLRDPFEEHGD

SEQ ID NO: 5504 - protein, 25 aa, Artificial Sequence
  Synthetic
TGYALYTAFGQPSQQLRDPFEEHGD

SEQ ID NO: 5505 - protein, 25 aa, Artificial Sequence
  Synthetic
TGYALYTAFGQPSQQLRDPFEEHGD

SEQ ID NO: 5506 - protein, 25 aa, Artificial Sequence
  Synthetic
TGYALYTAFGQPSQQLRDPFEEHGD

SEQ ID NO: 5507 - protein, 25 aa, Artificial Sequence
  Synthetic
TGYALYTAFGQPSQQLRDPFEEHGD

SEQ ID NO: 5508 - protein, 25 aa, Artificial Sequence
  Synthetic
TGYALYTAFGQPSQQLRDPFEEHGD

SEQ ID NO: 5509 - protein, 25 aa, Artificial Sequence
  Synthetic
TGYALYTAFGQPSQQLRDPFEEHGD

SEQ ID NO: 5510 - protein, 25 aa, Artificial Sequence
  Synthetic
TGYALYTAFGQPSQQLRDPFEEHGD

SEQ ID NO: 5511 - protein, 25 aa, Artificial Sequence
  Synthetic
TGYALYTAFGQPSQQLRDPFEEHGD

SEQ ID NO: 5512 - protein, 25 aa, Artificial Sequence
  Synthetic
TGYALYTAFGQPSQQLRDPFEEHGD

SEQ ID NO: 5513 - protein, 25 aa, Artificial Sequence
  Synthetic
TGYALYTAFGQPSQQLRDPFEEHGD

SEQ ID NO: 5514 - protein, 25 aa, Artificial Sequence
  Synthetic
TGYALYTAFGQPSQQLRDPFEEHGD

SEQ ID NO: 5515 - protein, 25 aa, Artificial Sequence
  Synthetic
TGYALYTAFGQPSQQLRDPFEEHGD

SEQ ID NO: 5516 - protein, 25 aa, Artificial Sequence
  Synthetic
TGYALYTAFGQPSQQLRDPFEEHGD

SEQ ID NO: 5517 - protein, 25 aa, Artificial Sequence
  Synthetic
TGYALYTAFGQPSQQLRDPFEEHGD

SEQ ID NO: 5518 - protein, 25 aa, Artificial Sequence
  Synthetic
TGYALYTAFGQPSQQLRDPFEEHGD

SEQ ID NO: 5519 - protein, 25 aa, Artificial Sequence
  Synthetic
TGYALYTAFGQPSQQLRDPFEEHGD

SEQ ID NO: 5520 - protein, 25 aa, Artificial Sequence
  Synthetic
TGYALYTAFGQPSQQLRDPFEEHGD

SEQ ID NO: 5521 - protein, 25 aa, Artificial Sequence
  Synthetic
TGYALYTAFGQPSQQLRDPFEEHGD

SEQ ID NO: 5522 - protein, 25 aa, Artificial Sequence
  Synthetic
TGYALYTAFGQPSQQLRDPFEEHGD

SEQ ID NO: 5523 - protein, 25 aa, Artificial Sequence
  Synthetic
TGYALYTAFGQPSQQLRDPFEEHGD

SEQ ID NO: 5524 - protein, 25 aa, Artificial Sequence
  Synthetic
TGYALYTAFGQPSQQLRDPFEEHGD

SEQ ID NO: 5525 - protein, 25 aa, Artificial Sequence
  Synthetic
TGYALYTAFGQPSQQLRDPFEEHGD

SEQ ID NO: 5526 - protein, 25 aa, Artificial Sequence
  Synthetic
TGYALYTAFGQPSQQLRDPFEEHGD

SEQ ID NO: 5527 - protein, 25 aa, Artificial Sequence
  Synthetic
TGYALYTAFGQPSQQLRDPFEEHGD

SEQ ID NO: 5528 - protein, 25 aa, Artificial Sequence
  Synthetic
TGYALYTAFGQPSQQLRDPFEEHGD

SEQ ID NO: 5529 - protein, 25 aa, Artificial Sequence
  Synthetic
TGYALYTAFGQPSQQLRDPFEEHGD

SEQ ID NO: 5530 - protein, 25 aa, Artificial Sequence
  Synthetic
TGYALYTAFGQPSQQLRDPFEEHGD

SEQ ID NO: 5531 - protein, 25 aa, Artificial Sequence
  Synthetic
TGYALYTAFGQPSQQLRDPFEEHGD

SEQ ID NO: 5532 - protein, 25 aa, Artificial Sequence
  Synthetic
TGYALYTAFGQPSQQLRDPFEEHGD

SEQ ID NO: 5533 - protein, 25 aa, Artificial Sequence
  Synthetic
TGYALYTAFGQPSQQLRDPFEEHGD

SEQ ID NO: 5534 - protein, 25 aa, Artificial Sequence
  Synthetic
TGYALYTAFGQPSQQLRDPFEEHGD

SEQ ID NO: 5535 - protein, 25 aa, Artificial Sequence
  Synthetic
TGYALYTAFGQPSQQLRDPFEEHGD

SEQ ID NO: 5536 - protein, 25 aa, Artificial Sequence
  Synthetic
TGYALYTAFGQPSQQLRDPFEEHGD

SEQ ID NO: 5537 - protein, 25 aa, Artificial Sequence
  Synthetic
TGYALYTAFGQPSQQLRDPFEEHGD

SEQ ID NO: 5538 - protein, 25 aa, Artificial Sequence
  Synthetic
TGYALYTAFGQPSQQLRDPFEEHGD

SEQ ID NO: 5539 - protein, 25 aa, Artificial Sequence
  Synthetic
TGYALYTAFGQPSQQLRDPFEEHGD

SEQ ID NO: 5540 - protein, 25 aa, Artificial Sequence
  Synthetic
TGYALYTAFGQPSQQLRDPFEEHGD

SEQ ID NO: 5541 - protein, 25 aa, Artificial Sequence
  Synthetic
TGYALYTAFGQPSQQLRDPFEEHGD

SEQ ID NO: 5542 - protein, 25 aa, Artificial Sequence
  Synthetic
TGYALYTAFGQPSQQLRDPFEEHGD

SEQ ID NO: 5543 - protein, 25 aa, Artificial Sequence
  Synthetic
TGYALYTAFGQPSQQLRDPFEEHGD

SEQ ID NO: 5544 - protein, 25 aa, Artificial Sequence
  Synthetic
TGYALYTAFGQPSQQLRDPFEEHGD

SEQ ID NO: 5545 - protein, 25 aa, Artificial Sequence
  Synthetic
TGYALYTAFGQPSQQLRDPFEEHGD

SEQ ID NO: 5546 - protein, 25 aa, Artificial Sequence
  Synthetic
TGYALYTAFGQPSQQLRDPFEEHGD

SEQ ID NO: 5547 - protein, 25 aa, Artificial Sequence
  Synthetic
TGYALYTAFGQPSQQLRDPFEEHGD

SEQ ID NO: 5548 - protein, 25 aa, Artificial Sequence
  Synthetic
TGYALYTAFGQPSQQLRDPFEEHGD

SEQ ID NO: 5549 - protein, 25 aa, Artificial Sequence
  Synthetic
TGYALYTAFGQPSQQLRDPFEEHGD

SEQ ID NO: 5550 - protein, 25 aa, Artificial Sequence
  Synthetic
TGYALYTAFGQPSQQLRDPFEEHGD

SEQ ID NO: 5551 - protein, 25 aa, Artificial Sequence
  Synthetic
TGYALYTAFGQPSQQLRDPFEEHGD

SEQ ID NO: 5552 - protein, 25 aa, Artificial Sequence
  Synthetic
TGYALYTAFGQPSQQLRDPFEEHGD

SEQ ID NO: 5553 - protein, 25 aa, Artificial Sequence
  Synthetic
TGYALYTAFGQPSQQLRDPFEEHGD

SEQ ID NO: 5554 - protein, 25 aa, Artificial Sequence
  Synthetic
TGYALYTAFGQPSQQLRDPFEEHGD

SEQ ID NO: 5555 - protein, 25 aa, Artificial Sequence
  Synthetic
TGYALYTAFGQPSQQLRDPFEEHGD

SEQ ID NO: 5556 - protein, 25 aa, Artificial Sequence
  Synthetic
TGYALYTAFGQPSQQLRDPFEEHGD

SEQ ID NO: 5557 - protein, 25 aa, Artificial Sequence
  Synthetic
TGYALYTAFGQPSQQLRDPFEEHGD

SEQ ID NO: 5558 - protein, 25 aa, Artificial Sequence
  Synthetic
TGYALYTAFGQPSQQLRDPFEEHGD

SEQ ID NO: 5559 - protein, 25 aa, Artificial Sequence
  Synthetic
TGYALYTAFGQPSQQLRDPFEEHGD

SEQ ID NO: 5560 - protein, 25 aa, Artificial Sequence
  Synthetic
TGYALYTAFGQPSQQLRDPFEEHGD

SEQ ID NO: 5561 - protein, 25 aa, Artificial Sequence
  Synthetic
TGYALYTAFGQPSQQLRDPFEEHGD

SEQ ID NO: 5562 - protein, 25 aa, Artificial Sequence
  Synthetic
TGYALYTAFGQPSQQLRDPFEEHGD

SEQ ID NO: 5563 - protein, 25 aa, Artificial Sequence
  Synthetic
TGYALYTAFGQPSQQLRDPFEEHGD

SEQ ID NO: 5564 - protein, 25 aa, Artificial Sequence
  Synthetic
TGYALYTAFGQPSQQLRDPFEEHGD

SEQ ID NO: 5565 - protein, 25 aa, Artificial Sequence
  Synthetic
TGYALYTAFGQPSQQLRDPFEEHGD

SEQ ID NO: 5566 - protein, 25 aa, Artificial Sequence
  Synthetic
TGYALYTAFGQPSQQLRDPFEEHGD

SEQ ID NO: 5567 - protein, 25 aa, Artificial Sequence
  Synthetic
TGYALYTAFGQPSQQLRDPFEEHGD

SEQ ID NO: 5568 - protein, 25 aa, Artificial Sequence
  Synthetic
TGYALYTAFGQPSQQLRDPFEEHGD

SEQ ID NO: 5569 - protein, 25 aa, Artificial Sequence
  Synthetic
TGYALYTAFGQPSQQLRDPFEEHGD

SEQ ID NO: 5570 - protein, 25 aa, Artificial Sequence
  Synthetic
TGYALYTAFGQPSQQLRDPFEEHGD

SEQ ID NO: 5571 - protein, 25 aa, Artificial Sequence
  Synthetic
TGYALYTAFGQPSQQLRDPFEEHGD

SEQ ID NO: 5572 - protein, 25 aa, Artificial Sequence
  Synthetic
TGYALYTAFGQPSQQLRDPFEEHGD

SEQ ID NO: 5573 - protein, 25 aa, Artificial Sequence
  Synthetic
TGYALYTAFGQPSQQLRDPFEEHGD

SEQ ID NO: 5574 - protein, 25 aa, Artificial Sequence
  Synthetic
TGYALYTAFGQPSQQLRDPFEEHGD

SEQ ID NO: 5575 - protein, 25 aa, Artificial Sequence
  Synthetic
TGYALYTAFGQPSQQLRDPFEEHGD

SEQ ID NO: 5576 - protein, 25 aa, Artificial Sequence
  Synthetic
TGYALYTAFGQPSQQLRDPFEEHGD

SEQ ID NO: 5577 - protein, 25 aa, Artificial Sequence
  Synthetic
TGYALYTAFGQPSQQLRDPFEEHGD

SEQ ID NO: 5578 - protein, 25 aa, Artificial Sequence
  Synthetic
TGYALYTAFGQPSQQLRDPFEEHGD

SEQ ID NO: 5579 - protein, 25 aa, Artificial Sequence
  Synthetic
TGYALYTAFGQPSQQLRDPFEEHGD

SEQ ID NO: 5580 - protein, 25 aa, Artificial Sequence
  Synthetic
TGYALYTAFGQPSQQLRDPFEEHGD

SEQ ID NO: 5581 - protein, 25 aa, Artificial Sequence
  Synthetic
TGYALYTAFGQPSQQLRDPFEEHGD

SEQ ID NO: 5582 - protein, 25 aa, Artificial Sequence
  Synthetic
TGYALYTAFGQPSQQLRDPFEEHGD

SEQ ID NO: 5583 - protein, 25 aa, Artificial Sequence
  Synthetic
TGYALYTAFGQPSQQLRDPFEEHGD

SEQ ID NO: 5584 - protein, 25 aa, Artificial Sequence
  Synthetic
TGYALYTAFGQPSQQLRDPFEEHGD

SEQ ID NO: 5585 - protein, 25 aa, Artificial Sequence
  Synthetic
TGYALYTAFGQPSQQLRDPFEEHGD

SEQ ID NO: 5586 - protein, 25 aa, Artificial Sequence
  Synthetic
TGYALYTAFGQPSQQLRDPFEEHGD

SEQ ID NO: 5587 - protein, 25 aa, Artificial Sequence
  Synthetic
TGYALYTAFGQPSQQLRDPFEEHGD

SEQ ID NO: 5588 - protein, 25 aa, Artificial Sequence
  Synthetic
TGYALYTAFGQPSQQLRDPFEEHGD

SEQ ID NO: 5589 - protein, 25 aa, Artificial Sequence
  Synthetic
TGYALYTAFGQPSQQLRDPFEEHGD

SEQ ID NO: 5590 - protein, 25 aa, Artificial Sequence
  Synthetic
TGYALYTAFGQPSQQLRDPFEEHGD

SEQ ID NO: 5591 - protein, 25 aa, Artificial Sequence
  Synthetic
TGYALYTAFGQPSQQLRDPFEEHGD

SEQ ID NO: 5592 - protein, 25 aa, Artificial Sequence
  Synthetic
TGYALYTAFGQPSQQLRDPFEEHGD

SEQ ID NO: 5593 - protein, 25 aa, Artificial Sequence
  Synthetic
TGYALYTAFGQPSQQLRDPFEEHGD

SEQ ID NO: 5594 - protein, 25 aa, Artificial Sequence
  Synthetic
TGYALYTAFGQPSQQLRDPFEEHGD

SEQ ID NO: 5595 - protein, 25 aa, Artificial Sequence
  Synthetic
TGYALYTAFGQPSQQLRDPFEEHGD

SEQ ID NO: 5596 - protein, 25 aa, Artificial Sequence
  Synthetic
TGYALYTAFGQPSQQLRDPFEEHGD

SEQ ID NO: 5597 - protein, 25 aa, Artificial Sequence
  Synthetic
TGYALYTAFGQPSQQLRDPFEEHGD

SEQ ID NO: 5598 - protein, 25 aa, Artificial Sequence
  Synthetic
TGYALYTAFGQPSQQLRDPFEEHGD

SEQ ID NO: 5599 - protein, 25 aa, Artificial Sequence
  Synthetic
TGYALYTAFGQPSQQLRDPFEEHGD

SEQ ID NO: 5600 - protein, 25 aa, Artificial Sequence
  Synthetic
TGYALYTAFGQPSQQLRDPFEEHGD

SEQ ID NO: 5601 - protein, 25 aa, Artificial Sequence
  Synthetic
TGYALYTAFGQPSQQLRDPFEEHGD

SEQ ID NO: 5602 - protein, 25 aa, Artificial Sequence
  Synthetic
TGYALYTAFGQPSQQLRDPFEEHGD

SEQ ID NO: 5603 - protein, 25 aa, Artificial Sequence
  Synthetic
TGYALYTAFGQPSQQLRDPFEEHGD

SEQ ID NO: 5604 - protein, 25 aa, Artificial Sequence
  Synthetic
TGYALYTAFGQPSQQLRDPFEEHGD

SEQ ID NO: 5605 - protein, 25 aa, Artificial Sequence
  Synthetic
TGYALYTAFGQPSQQLRDPFEEHGD

SEQ ID NO: 5606 - protein, 25 aa, Artificial Sequence
  Synthetic
TGYALYTAFGQPSQQLRDPFEEHGD

SEQ ID NO: 5607 - protein, 34 aa, Artificial Sequence
  Synthetic
AIQCVESACESLCTEGEDRTGCYMYIYSNCPPYV

SEQ ID NO: 5608 - protein, 39 aa, Artificial Sequence
  Synthetic
CNSLGRNFTGGECSDARFPGLSVCYCCHNVESSAEMESM

SEQ ID NO: 5609 - protein, 24 aa, Artificial Sequence
  Synthetic
DEMNTVLDSLATRDFINWLLQTKI

SEQ ID NO: 5610 - protein, 28 aa, Artificial Sequence
  Synthetic
DEMSTILDNLATRDFINWLIQTKITDKK

SEQ ID NO: 5611 - protein, 24 aa, Artificial Sequence
  Synthetic
IYGGCYGNANNFKAIEECKRTCAA

SEQ ID NO: 5612 - protein, 42 aa, Artificial Sequence
  Synthetic
CLKSAASSFTGLDLGKAASLPSTCSVNIPYKISPSTDCSKVQ

SEQ ID NO: 5613 - protein, 17 aa, Artificial Sequence
  Synthetic
GGYCKSMSHGGQCHCYC

SEQ ID NO: 5614 - protein, 26 aa, Artificial Sequence
  Synthetic
AALENFGQRMNLIIPGNCSNLVCPSN

SEQ ID NO: 5615 - protein, 20 aa, Artificial Sequence
  Synthetic
ERLAYEATSIVNDVNLDHAY

SEQ ID NO: 5616 - protein, 24 aa, Artificial Sequence
  Synthetic
TKGADKCDTAYQLFECYYKNRAHI

SEQ ID NO: 5617 - protein, 30 aa, Artificial Sequence
  Synthetic
YCTGAGAAAAMVLCTWMACFAGKKQKHYPY

SEQ ID NO: 5618 - protein, 36 aa, Artificial Sequence
  Synthetic
GTGMFRMARGYAIARTNWFDPKTGDAIVGYNVTIMH

SEQ ID NO: 5619 - protein, 25 aa, Artificial Sequence
  Synthetic
TCLTKMVECIQLPLDVEDSSDTLCC

SEQ ID NO: 5620 - protein, 23 aa, Artificial Sequence
  Synthetic
AAKGAGTASKLTFGTGTRLQVTL

SEQ ID NO: 5621 - protein, 39 aa, Artificial Sequence
  Synthetic
GIGHFCGKFFNNAVCAEGLKCAKLGEGADGEALEICLRA

SEQ ID NO: 5622 - protein, 25 aa, Artificial Sequence
  Synthetic
TGYSLYTSFGNASSELRDPFEEHED

SEQ ID NO: 5623 - protein, 22 aa, Artificial Sequence
  Synthetic
TLAGSFVTAYPQYRRGDQLDLR

SEQ ID NO: 5624 - protein, 14 aa, Artificial Sequence
  Synthetic
LITALSALVTWMQF

SEQ ID NO: 5625 - protein, 42 aa, Artificial Sequence
  Synthetic
GLSCCHRYGGLAERAGCKSVLNQVTCEYEFYRLDDLSKRCDA

SEQ ID NO: 5626 - protein, 27 aa, Artificial Sequence
  Synthetic
VEDLARTFFAHFPLGSTLGFHVPYQED

SEQ ID NO: 5627 - protein, 30 aa, Artificial Sequence
  Synthetic
MADIVSAGWAFLMVSFTFSLSLVVWGRSGL

SEQ ID NO: 5628 - protein, 31 aa, Artificial Sequence
  Synthetic
EQLENGGTSLSEKTVLLLVTPLLAAAWCLHP

SEQ ID NO: 5629 - protein, 22 aa, Artificial Sequence
  Synthetic
AAVTTYAGIFTDQLFSMLKGEQ

SEQ ID NO: 5630 - protein, 21 aa, Artificial Sequence
  Synthetic
NVYEYANDFASTCASLSSSPA

SEQ ID NO: 5631 - protein, 29 aa, Artificial Sequence
  Synthetic
EISTYVGAAVKGSVAGMGAIMGAAAFALL

SEQ ID NO: 5632 - protein, 29 aa, Artificial Sequence
  Synthetic
EISTYVGAAVKGSVAGMGAIMGAAAFALL

SEQ ID NO: 5633 - protein, 29 aa, Artificial Sequence
  Synthetic
EISTYVGAAVKGSVAGMGAIMGAAAFALL

SEQ ID NO: 5634 - protein, 29 aa, Artificial Sequence
  Synthetic
EISTYVGAAVKGSVAGMGAIMGAAAFALL

SEQ ID NO: 5635 - protein, 29 aa, Artificial Sequence
  Synthetic
EISTYVGAAVKGSVAGMGAIMGAAAFALL

SEQ ID NO: 5636 - protein, 22 aa, Artificial Sequence
  Synthetic
AAMSTYAGILTDQVLSMLKGEE

SEQ ID NO: 5637 - protein, 25 aa, Artificial Sequence
  Synthetic
TGYSLYTAFGEPSAELRDPFEEHED

SEQ ID NO: 5638 - protein, 24 aa, Artificial Sequence
  Synthetic
SCLSVADEIASSLRNGDIGPFHVG

SEQ ID NO: 5639 - protein, 22 aa, Artificial Sequence
  Synthetic
TKADQLAQQAHSNRKLLDIAGK

SEQ ID NO: 5640 - protein, 24 aa, Artificial Sequence
  Synthetic
AAHCIARGNRGGYCNSKKVCVCRN

SEQ ID NO: 5641 - protein, 18 aa, Artificial Sequence
  Synthetic
KNVAGALVGVVAIAAAMM

SEQ ID NO: 5642 - protein, 24 aa, Artificial Sequence
  Synthetic
IYGGCYGNANNFKTIEECKLTCAA

SEQ ID NO: 5643 - protein, 13 aa, Artificial Sequence
  Synthetic
GHGGYGHGGRGGY

SEQ ID NO: 5644 - protein, 31 aa, Artificial Sequence
  Synthetic
RSCGNLGESCSAHRCCPGLMCMGEASICIPY

SEQ ID NO: 5645 - protein, 37 aa, Artificial Sequence
  Synthetic
GTAVIAAVVAALLWKFSRRRSGAPREGGENENGGEEK

SEQ ID NO: 5646 - protein, 23 aa, Artificial Sequence
  Synthetic
NTAVSWLRTIFHDCMVESCDASI

SEQ ID NO: 5647 - protein, 41 aa, Artificial Sequence
  Synthetic
MKDFTTYLSTAPVVAFAWITITAGLLIEINRFFPDPLVFSF

SEQ ID NO: 5648 - protein, 17 aa, Artificial Sequence
  Synthetic
EKCCKNGCGFMTCSRPR

SEQ ID NO: 5649 - protein, 31 aa, Artificial Sequence
  Synthetic
VSDGVSAGVGVGVAMIIQTSPSACKKYYKLY

SEQ ID NO: 5650 - protein, 37 aa, Artificial Sequence
  Synthetic
GSSAEALLSDLHAFSGSAAWDDSAGGAGGQGLRVTAL

SEQ ID NO: 5651 - protein, 37 aa, Artificial Sequence
  Synthetic
NLQGVCAEGFACITLSGNPVMNLNGGGQEVGRCRKKY

SEQ ID NO: 5652 - protein, 39 aa, Artificial Sequence
  Synthetic
VSKATDCIEAGNYCGPTVMKICCGFCSPFSKICMNYPQN

SEQ ID NO: 5653 - protein, 23 aa, Artificial Sequence
  Synthetic
YGGCGGNANNFKSRGECKRTCAE

SEQ ID NO: 5654 - protein, 21 aa, Artificial Sequence
  Synthetic
DVYTYANGFASTCASLSSSSA

SEQ ID NO: 5655 - protein, 41 aa, Artificial Sequence
  Synthetic
ISELSNGAETVSSSFLEEVTETSESTVEFPLAETTTFSSTS

SEQ ID NO: 5656 - protein, 28 aa, Artificial Sequence
  Synthetic
DEMNTILDNLATRDFINWLIQTKITDKK

SEQ ID NO: 5657 - protein, 22 aa, Artificial Sequence
  Synthetic
AAMSTYTGIFTDQVLSVLKGEE

SEQ ID NO: 5658 - protein, 22 aa, Artificial Sequence
  Synthetic
AAMSTYTGIFTDQVLSVLKGEE

SEQ ID NO: 5659 - protein, 23 aa, Artificial Sequence
  Synthetic
VFQGVSAWFALVFTVGVLNSLVA

SEQ ID NO: 5660 - protein, 32 aa, Artificial Sequence
  Synthetic
KAAKAVLDAAPADKFKLMDESFKVAAMEVIVS

SEQ ID NO: 5661 - protein, 26 aa, Artificial Sequence
  Synthetic
AMLGFIAALLTESLTGQGTLHFLGIL

SEQ ID NO: 5662 - protein, 14 aa, Artificial Sequence
  Synthetic
TWVQEYITELELNA

SEQ ID NO: 5663 - protein, 22 aa, Artificial Sequence
  Synthetic
SAAATMIASFSAILIALLFALL

SEQ ID NO: 5664 - protein, 23 aa, Artificial Sequence
  Synthetic
NTAVSWLRTIFHDCMVESCDASI

SEQ ID NO: 5665 - protein, 23 aa, Artificial Sequence
  Synthetic
NTAVSWLRTIFHDCMVESCDASI

SEQ ID NO: 5666 - protein, 41 aa, Artificial Sequence
  Synthetic
MKDFTTYLSTAPVIATIWFTFTAGLLIEINRYFPDPLVFSF

SEQ ID NO: 5667 - protein, 29 aa, Artificial Sequence
  Synthetic
NFATSVRYFLNNAATGETVFCNQFRVKVA

SEQ ID NO: 5668 - protein, 22 aa, Artificial Sequence
  Synthetic
AAVSTYAGIFTDQVLSMLRGEE

SEQ ID NO: 5669 - protein, 33 aa, Artificial Sequence
  Synthetic
DVAAEIMSGLIALAIDSCCSDSDCNANHPDMCS

SEQ ID NO: 5670 - protein, 14 aa, Artificial Sequence
  Synthetic
TWVQEYITDLELNA

SEQ ID NO: 5671 - protein, 17 aa, Artificial Sequence
  Synthetic
VSGIIAAYTAYYGPIPY

SEQ ID NO: 5672 - protein, 22 aa, Artificial Sequence
  Synthetic
AAMSTYTGIFTDQVLSVLKGEE

SEQ ID NO: 5673 - protein, 22 aa, Artificial Sequence
  Synthetic
SEAEDFFSKITQKDLLKSVSTA

SEQ ID NO: 5674 - protein, 41 aa, Artificial Sequence
  Synthetic
LAGLVQALLALPLAVLVALVALTESIARSSCSIGLSECGLL

SEQ ID NO: 5675 - protein, 22 aa, Artificial Sequence
  Synthetic
SEAEDFFSKITQKDLLKSVSTA

SEQ ID NO: 5676 - protein, 23 aa, Artificial Sequence
  Synthetic
YGGCGGNANNFKSRGECKRTCAE

SEQ ID NO: 5677 - protein, 25 aa, Artificial Sequence
  Synthetic
YSAGRGIVDECCLRPCSVDVLLSYC

SEQ ID NO: 5678 - protein, 37 aa, Artificial Sequence
  Synthetic
TFHRLVHTVFTPSNQDTFECEVVHEGVKKTVKWEPDN

SEQ ID NO: 5679 - protein, 40 aa, Artificial Sequence
  Synthetic
GGGYGGGYGGRYGGNYGSSSWGSYSSYSSGGYSSYNSGFW

SEQ ID NO: 5680 - protein, 31 aa, Artificial Sequence
  Synthetic
GYGKGGGGGGGGGGDGGGGGGGGSAYVGRHE

SEQ ID NO: 5681 - protein, 39 aa, Artificial Sequence
  Synthetic
KLVSEAFHQLSIQKEDALKTLEMQVDTLSDLIKSKLLND

SEQ ID NO: 5682 - protein, 30 aa, Artificial Sequence
  Synthetic
SYGSEYGNSGYACNFPCSYGRFLLAPRKKF

SEQ ID NO: 5683 - protein, 22 aa, Artificial Sequence
  Synthetic
AAMSTYAGILTDQVLSMLKGEE

SEQ ID NO: 5684 - protein, 28 aa, Artificial Sequence
  Synthetic
GDSCSKAYHAGMCFMNSNLQLVQHSVKV

SEQ ID NO: 5685 - protein, 42 aa, Artificial Sequence
  Synthetic
IDGAWSIWADAGVANPAGNTDCVGIAARVEDVTNPNSCVYTQ

SEQ ID NO: 5686 - protein, 42 aa, Artificial Sequence; identical to SEQ ID NO: 5685
  Synthetic

SEQ ID NO: 5687 - protein, 27 aa, Artificial Sequence
  Synthetic
GCGGVCAYGESCPSSCNTCYSAQCTAQ

SEQ ID NO: 5688 - protein, 28 aa, Artificial Sequence
  Synthetic
RDGCSNAGAFCGIHPGLCCSEICIVWCT

SEQ ID NO: 5689 - protein, 29 aa, Artificial Sequence
  Synthetic
ATAISTLSGFCGVVLGFTIDPNTDCNFIQ

SEQ ID NO: 5690 - protein, 31 aa, Artificial Sequence
  Synthetic
GHGGCHHYCHGSCCSAAEAKALEAAQVKPQN

SEQ ID NO: 5691 - protein, 40 aa, Artificial Sequence
  Synthetic
QNGHDYYGDYYQRHYDEDAAIGPRSREGFRHGASVNYDDY

SEQ ID NO: 5692 - protein, 33 aa, Artificial Sequence
  Synthetic
DVAAEMMSGLIALAIDSCCSDSDCNANHPDMCS

SEQ ID NO: 5693 - protein, 28 aa, Artificial Sequence
  Synthetic
MSEARNLFTTFGILAILLFFLYLIYAVL

SEQ ID NO: 5694 - protein, 36 aa, Artificial Sequence
  Synthetic
GMCSGIGQGCGQDSNCCGDMCCYGQICAMTFAACGP

SEQ ID NO: 5695 - protein, 31 aa, Artificial Sequence
  Synthetic
HLLRNMIEMARIESQKEQAELNRKYLDEVGK

SEQ ID NO: 5696 - protein, 35 aa, Artificial Sequence
  Synthetic
SDVNKVLDSLAAKEYLLWVMTSKTSGKSNKRQEDH

SEQ ID NO: 5697 - protein, 22 aa, Artificial Sequence
  Synthetic
TCISQLAQYADSLLVPETKDAA

SEQ ID NO: 5698 - protein, 21 aa, Artificial Sequence
  Synthetic
GYCGSGNAYCGAGNCRCQCRG

SEQ ID NO: 5699 - protein, 22 aa, Artificial Sequence
  Synthetic
AAMSTYTGIFTDQVLSVLKGEE

SEQ ID NO: 5700 - protein, 30 aa, Artificial Sequence
  Synthetic
NAMPAFGGRLADEDIENVANYVLNKSENGW

SEQ ID NO: 5701 - protein, 14 aa, Artificial Sequence
  Synthetic
IIAAYTAYYGPIPY

SEQ ID NO: 5702 - protein, 28 aa, Artificial Sequence
  Synthetic
DEMNTILDSLATRDFINWLIQTKITDKK

SEQ ID NO: 5703 - protein, 35 aa, Artificial Sequence
  Synthetic
GFAATLVTEAECNLATISGVAECPWILGGGTMPSK

SEQ ID NO: 5704 - protein, 36 aa, Artificial Sequence
  Synthetic
SEIGGGCKEGEGEEECLARRTLTAHTDYIYTQQHHN

SEQ ID NO: 5705 - protein, 33 aa, Artificial Sequence
  Synthetic
EALEEFKEVARAKGLNPDIVRPQQSETCSPGGN

SEQ ID NO: 5706 - protein, 35 aa, Artificial Sequence
  Synthetic
RNAAAKASGLVSLTDRRPECCSHPACNVDHPEICR

SEQ ID NO: 5707 - protein, 19 aa, Artificial Sequence
  Synthetic
LGTCYTAGCSCSWPVCTRN

SEQ ID NO: 5708 - protein, 30 aa, Artificial Sequence
  Synthetic
FAQEADHVADKLCTEKSGLCQDSAAIHTEL

SEQ ID NO: 5709 - protein, 30 aa, Artificial Sequence
  Synthetic
GLPTCGETCFGGTCNTPGCSCSSWPICTRD

SEQ ID NO: 5710 - protein, 27 aa, Artificial Sequence
  Synthetic
ASCLEKFNEYAAGLPVRDVYTSDCLPE

SEQ ID NO: 5711 - protein, 28 aa, Artificial Sequence
  Synthetic
VKGCAKTCPTAGPGERVKCCYSPRCNKN

SEQ ID NO: 5712 - protein, 31 aa, Artificial Sequence
  Synthetic
GLPTCGETCFGGTCNTPGCTCDSSWPICTHN

SEQ ID NO: 5713 - protein, 30 aa, Artificial Sequence
  Synthetic
GLPTCGETCFGGTCNTPGCTCDPWPVCTHN

SEQ ID NO: 5714 - protein, 41 aa, Artificial Sequence
  Synthetic
IAKAVACAKHIVSEQGITAWVAWKSHCRDHDVSSYVEGCTL

SEQ ID NO: 5715 - protein, 41 aa, Artificial Sequence
  Synthetic
IAKAVACAKHIVSEQGITAWVAWKSHCRDHDVSSYVQGCTL

SEQ ID NO: 5716 - protein, 39 aa, Artificial Sequence
  Synthetic
GNNYGKGYGGGSGKGKGGGKGGKGGKGGTYKPSHYGGGY

SEQ ID NO: 5717 - protein, 39 aa, Artificial Sequence; identical to SEQ ID NO: 5716
  Synthetic

SEQ ID NO: 5718 - protein, 34 aa, Artificial Sequence
  Synthetic
SGYCQWAGRYGNACWCIDLPDKVPIRIPGPCRGR

SEQ ID NO: 5719 - protein, 20 aa, Artificial Sequence
  Synthetic
GRGFCNSFGNYNFCQCEYPC

SEQ ID NO: 5720 - protein, 31 aa, Artificial Sequence
  Synthetic
RSCGHSGAGCYTRPCCPGLHCSGGHAGGLCV

SEQ ID NO: 5721 - protein, 28 aa, Artificial Sequence
  Synthetic
VKGCAKTCPTAQPGESVQCCNTPKCNDY

SEQ ID NO: 5722 - protein, 19 aa, Artificial Sequence
  Synthetic
ADAQGIVAAYQAFYGPIPF

SEQ ID NO: 5723 - protein, 41 aa, Artificial Sequence
  Synthetic
IAKAVACAKQIVSEQGITAWVAWKSHCRDHDVSSYVEGCTL

SEQ ID NO: 5724 - protein, 32 aa, Artificial Sequence
  Synthetic
SAAHIVNHAISAVNHQTSLLSYIAFVATGKLS

SEQ ID NO: 5725 - protein, 41 aa, Artificial Sequence
  Synthetic
GRGGSEYYGGFHQHHYDEDAAIGPRNPYTYRHGAGVNYDDY

SEQ ID NO: 5726 - protein, 33 aa, Artificial Sequence
  Synthetic
EKCMAKYKGVGTVTYFPFPPETIIIYCECLYDC

SEQ ID NO: 5727 - protein, 26 aa, Artificial Sequence
  Synthetic
NAKRYLRTLWNSRDCCDPKEPCCFIG

SEQ ID NO: 5728 - protein, 41 aa, Artificial Sequence
  Synthetic
HGVNNLGQDGHGQHGYAHGHSDQHGHGGQHGQHDGYKNRGY

SEQ ID NO: 5729 - protein, 32 aa, Artificial Sequence
  Synthetic
KACGSNIAACCQTGDSEGNLLNLEANCLAIPL

SEQ ID NO: 5730 - protein, 14 aa, Artificial Sequence
  Synthetic
LFASVVALASGFIF

SEQ ID NO: 5731 - protein, 17 aa, Artificial Sequence
  Synthetic
EFFNAIWGPGTLVTVSS

SEQ ID NO: 5732 - protein, 24 aa, Artificial Sequence
  Synthetic
AGGKCVHIGQSLDFVCVCFPKYYI

SEQ ID NO: 5733 - protein, 17 aa, Artificial Sequence
  Synthetic
AAQNFVAWLKSGQPKQE

SEQ ID NO: 5734 - protein, 28 aa, Artificial Sequence
  Synthetic
FARGYAQAKTYKVVGLDAVVEYNVFIWH

SEQ ID NO: 5735 - protein, 20 aa, Artificial Sequence
  Synthetic
VDHVVDHAQDLVDDGPLDLD

SEQ ID NO: 5736 - protein, 20 aa, Artificial Sequence
  Synthetic
GHGFCNTLGTFSFCQCEYPC

SEQ ID NO: 5737 - protein, 28 aa, Artificial Sequence
  Synthetic
DCYGYGNGYGNGYGNGYGYGNGYGYGGY

SEQ ID NO: 5738 - protein, 42 aa, Artificial Sequence
  Synthetic
AGVGSRIGTGISTTMNARVAVLITAAILSAPVTAIALLEARR

SEQ ID NO: 5739 - protein, 42 aa, Artificial Sequence; identical to SEQ ID NO: 5738
  Synthetic

SEQ ID NO: 5740 - protein, 42 aa, Artificial Sequence; identical to SEQ ID NO: 5738
  Synthetic

SEQ ID NO: 5741 - protein, 42 aa, Artificial Sequence; identical to SEQ ID NO: 5738
  Synthetic

SEQ ID NO: 5742 - protein, 42 aa, Artificial Sequence; identical to SEQ ID NO: 5738
  Synthetic

SEQ ID NO: 5743 - protein, 22 aa, Artificial Sequence
  Synthetic
AAMSTYAGILTDQVLSMLKGEE

SEQ ID NO: 5744 - protein, 25 aa, Artificial Sequence
  Synthetic
YSAGRGIVDECCLRPCSVDVLLSYC

SEQ ID NO: 5745 - protein, 31 aa, Artificial Sequence
  Synthetic
HLLREVLEMARAEQMAQQAHSNRKMMEIFGK

SEQ ID NO: 5746 - protein, 27 aa, Artificial Sequence
  Synthetic
AASILQALRTMDNDECELCVNIACTGC

SEQ ID NO: 5747 - protein, 29 aa, Artificial Sequence
  Synthetic
HLLRNMIEMARIENEREQAGLNRKYLDEV

SEQ ID NO: 5748 - protein, 16 aa, Artificial Sequence
  Synthetic
LIALAGAALAAFGLLA

SEQ ID NO: 5749 - protein, 23 aa, Artificial Sequence
  Synthetic
YSAYMAKLNALRPADVPVKNHGK

SEQ ID NO: 5750 - protein, 20 aa, Artificial Sequence
  Synthetic
ECNQWCTAGCNPDTGKCDTT

SEQ ID NO: 5751 - protein, 14 aa, Artificial Sequence
  Synthetic
LFASVAALASGFLF

SEQ ID NO: 5752 - protein, 30 aa, Artificial Sequence
  Synthetic
NAMPAFGGRLVDEDIEDAANYVLSQSEKGW

SEQ ID NO: 5753 - protein, 30 aa, Artificial Sequence; identical to SEQ ID NO: 5752
  Synthetic

SEQ ID NO: 5754 - protein, 41 aa, Artificial Sequence
  Synthetic
MQDVKTYLSTAPVLATLWFGFLAGLLIEINRFFPDALVLPL

SEQ ID NO: 5755 - protein, 41 aa, Artificial Sequence
  Synthetic
MQDVKTYLSTAPVLATLWFGLLAGILIEINRFFPDALVLPY

SEQ ID NO: 5756 - protein, 39 aa, Artificial Sequence; identical to SEQ ID NO: 5716
  Synthetic

SEQ ID NO: 5757 - protein, 41 aa, Artificial Sequence
  Synthetic
GRGGSEYYGGFHQHHYDEDAPIGPRNPYTFRHGAGVNYDDY

SEQ ID NO: 5758 - protein, 28 aa, Artificial Sequence
  Synthetic
VKGCAKTCPSAKPGERVKCCSSPRCNEV

SEQ ID NO: 5759 - protein, 35 aa, Artificial Sequence
  Synthetic
AGVERLFRALVGRGCPADCPNTCDSSNKCSPGFPG

SEQ ID NO: 5760 - protein, 26 aa, Artificial Sequence
  Synthetic
CENGETCCDGWRCRYTGRAVPFMCVP

SEQ ID NO: 5761 - protein, 33 aa, Artificial Sequence
  Synthetic
DDGNAAASDLIALTIKGCCSLPPCALSNPDYCG

SEQ ID NO: 5762 - protein, 32 aa, Artificial Sequence
  Synthetic
REGCSSGGTFCGIHPGLCCSEFCFLWCITFID

SEQ ID NO: 5763 - protein, 27 aa, Artificial Sequence
  Synthetic
FYSLDSAFTTALSSAIIFLFFLINVIL

SEQ ID NO: 5764 - protein, 27 aa, Artificial Sequence
  Synthetic
FYSLDSAFTTALSSAIIFLLFLINVIL

SEQ ID NO: 5765 - protein, 41 aa, Artificial Sequence
  Synthetic
ISTFSTVGAEADCPISEAIKCVEKCKEKVEVCEPGVCKCSG

SEQ ID NO: 5766 - protein, 12 aa, Artificial Sequence
  Synthetic
AGRGCGCGANYY

SEQ ID NO: 5767 - protein, 34 aa, Artificial Sequence
  Synthetic
SAFGVGHAACAAHCIGHGYRGGYCNSKAVCTCRR

SEQ ID NO: 5768 - protein, 41 aa, Artificial Sequence; identical to SEQ ID NO: 5714
  Synthetic

SEQ ID NO: 5769 - protein, 28 aa, Artificial Sequence
  Synthetic
DEMNTVLDHLATKDFINWLIQTKITDRK

SEQ ID NO: 5770 - protein, 32 aa, Artificial Sequence
  Synthetic
RDGCSSGGTFCGIHPGLCCSEFCFLWCITFID

SEQ ID NO: 5771 - protein, 23 aa, Artificial Sequence
  Synthetic
AARTAASWAQEALRYGTLHSDEL

SEQ ID NO: 5772 - protein, 36 aa, Artificial Sequence
  Synthetic
GTGAFRFGRGYALAKTLVFNITSGDAVVEYNVYIWH

SEQ ID NO: 5773 - protein, 23 aa, Artificial Sequence
  Synthetic
NKCSQAANNAATKFDVSKCDEQA

SEQ ID NO: 5774 - protein, 17 aa, Artificial Sequence
  Synthetic
AAKDFVSWLKAGRGRRE

SEQ ID NO: 5775 - protein, 42 aa, Artificial Sequence
  Synthetic
YHGGQGYAKGGLGCSYGCGLSGYGYACYCPWCYERSWFSGCF

SEQ ID NO: 5776 - protein, 14 aa, Artificial Sequence
  Synthetic
IIAAYTAYYGPIPY

SEQ ID NO: 5777 - protein, 35 aa, Artificial Sequence; identical to SEQ ID NO: 5696
  Synthetic

SEQ ID NO: 5778 - protein, 28 aa, Artificial Sequence
  Synthetic
VSLFEGAGNTAQVGAGALVAAVAAALLL

SEQ ID NO: 5779 - protein, 41 aa, Artificial Sequence
  Synthetic
ISTFSTVGAEADCPISEAIKCVEKCNQKVEVCEPGVCKCSG

SEQ ID NO: 5780 - protein, 18 aa, Artificial Sequence
  Synthetic
ACLGDYCECLRWEGGISI

SEQ ID NO: 5781 - protein, 22 aa, Artificial Sequence
  Synthetic
ARAEQIAQQAHSNRKLMDIIGK

SEQ ID NO: 5782 - protein, 40 aa, Artificial Sequence
  Synthetic
TGCTCGSACGSWDVRAETTCHCQCAGMDWTGARCCRLHIQ

SEQ ID NO: 5783 - protein, 12 aa, Artificial Sequence
  Synthetic
GGEFLEAGGGVR

SEQ ID NO: 5784 - protein, 17 aa, Artificial Sequence
  Synthetic
IPAFFASVATLAFGFLF

SEQ ID NO: 5785 - protein, 31 aa, Artificial Sequence
  Synthetic
HLLREVLEMARAEQLVQQAHSNRKMMEIFGK

SEQ ID NO: 5786 - protein, 20 aa, Artificial Sequence
  Synthetic
GTGCDSGNQCCSGWCIFVCL

SEQ ID NO: 5787 - protein, 28 aa, Artificial Sequence
  Synthetic
TGLSTGATSLSLGLQLLLGLLLLLQYWL

SEQ ID NO: 5788 - protein, 27 aa, Artificial Sequence
  Synthetic
LGQQGWSAWSTWHYCSGYLPPIDDCFV

SEQ ID NO: 5789 - protein, 33 aa, Artificial Sequence
  Synthetic
VFGICADGFACVPLVGERDSQDPEIVGTCVKIP

SEQ ID NO: 5790 - protein, 38 aa, Artificial Sequence
  Synthetic
RNAAAKASGLVSLTDRRPECCSDPRCNSSHPELCGGRR

SEQ ID NO: 5791 - protein, 28 aa, Artificial Sequence
  Synthetic
GAHALQPAAAILALLPALGLLLWGPGQL

SEQ ID NO: 5792 - protein, 13 aa, Artificial Sequence
  Synthetic
AVAAGLLALGAFM

SEQ ID NO: 5793 - protein, 28 aa, Artificial Sequence
  Synthetic
VGNFGSAVCAGRVEVEGGVKHCHCYGTS

SEQ ID NO: 5794 - protein, 38 aa, Artificial Sequence
  Synthetic
RNAAAKASGLVGLTDRRPECCSDPRCNSTHPELCGGRR

SEQ ID NO: 5795 - protein, 38 aa, Artificial Sequence; identical to SEQ ID NO: 5794
  Synthetic

SEQ ID NO: 5796 - protein, 20 aa, Artificial Sequence
  Synthetic
AIPEYIARAVAYNLAHSAKV

SEQ ID NO: 5797 - protein, 24 aa, Artificial Sequence
  Synthetic
AAHCIARGNRGGYCNSQKVCVCRN

SEQ ID NO: 5798 - protein, 21 aa, Artificial Sequence
  Synthetic
LAIMSEAIAKVVLENKHKSSE

SEQ ID NO: 5799 - protein, 31 aa, Artificial Sequence
  Synthetic
SAATSLLSGFRTAATFSLATALVFAASFFLL

SEQ ID NO: 5800 - protein, 36 aa, Artificial Sequence
  Synthetic
GRNAAAKASDLVSLTDKKRGCCSDPRCNYDHPEICG

SEQ ID NO: 5801 - protein, 23 aa, Artificial Sequence
  Synthetic
YIALMAALLASVLAIRLGATLYQ

SEQ ID NO: 5802 - protein, 28 aa, Artificial Sequence
  Synthetic
AVKKYLAAVLGKRYKQRIKNKGRRVAYL

SEQ ID NO: 5803 - protein, 24 aa, Artificial Sequence
  Synthetic
IYGGCGGNANNFITKEECESTCAA

SEQ ID NO: 5804 - protein, 17 aa, Artificial Sequence
  Synthetic
QCADPVSKIVYEAPYEE

SEQ ID NO: 5805 - protein, 33 aa, Artificial Sequence
  Synthetic
GLQAIQGCAETCPVPEPDQEVKCCKTDYCNSYF

SEQ ID NO: 5806 - protein, 22 aa, Artificial Sequence
  Synthetic
ARAEQLAQQAHSNRKLMEIIGK

SEQ ID NO: 5807 - protein, 22 aa, Artificial Sequence
  Synthetic
ARAEQLAQQAHSNRKLMEIIGK

SEQ ID NO: 5808 - protein, 22 aa, Artificial Sequence
  Synthetic
ARAEQLAQQAHSNRKLMEIIGK

SEQ ID NO: 5809 - protein, 22 aa, Artificial Sequence
  Synthetic
ARAEQLAQQAHSNRKLMEIIGK

SEQ ID NO: 5810 - protein, 22 aa, Artificial Sequence
  Synthetic
ARAEQLAQQAHSNRKLMEIIGK

SEQ ID NO: 5811 - protein, 35 aa, Artificial Sequence
  Synthetic
GRDAAAKASGLVGLTDRRGCCSHPACNVDHPEICG

SEQ ID NO: 5812 - protein, 41 aa, Artificial Sequence
  Synthetic
IAKAVACAKHIVSEQGITAWVAWKSHCRDHDVSSYVEGCSL

SEQ ID NO: 5813 - protein, 41 aa, Artificial Sequence
  Synthetic
ISTFSTVGAEGDCPISEAIKCVEKCKEKVEVCEPGVCKCSG

SEQ ID NO: 5814 - protein, 19 aa, Artificial Sequence
  Synthetic
MDGYVDSIEDLKMVEPIGN

SEQ ID NO: 5815 - protein, 42 aa, Artificial Sequence
  Synthetic
LNSCHSACKSCMCTRSMPGKCRCLDTTDYCYKSCKSSGEDDD

SEQ ID NO: 5816 - protein, 38 aa, Artificial Sequence
  Synthetic
MLSIFETVAAAAPVTVAETQQASNNENRGQPGYYCLIA

SEQ ID NO: 5817 - protein, 16 aa, Artificial Sequence
  Synthetic
AGAFGAAIAAGVAFLF

SEQ ID NO: 5818 - protein, 24 aa, Artificial Sequence
  Synthetic
GNGGGSCFQIVNLKSCLCAFPCQV

SEQ ID NO: 5819 - protein, 33 aa, Artificial Sequence
  Synthetic
CGNNGGNCARSGICCNHESCTMDPACEQDSVFS

SEQ ID NO: 5820 - protein, 35 aa, Artificial Sequence
  Synthetic
FEPCEAGFENCCSKSCFEFEDVYVCGVSIDYYDSR

SEQ ID NO: 5821 - protein, 31 aa, Artificial Sequence
  Synthetic
HLLREVLEMARAEQLAQQAHSNRKMMEIFGK

SEQ ID NO: 5822 - protein, 34 aa, Artificial Sequence
  Synthetic
EALEDFEKAAGARGLSTESILIPRQSETCSPGSD

SEQ ID NO: 5823 - protein, 41 aa, Artificial Sequence
  Synthetic
GLGVLGGYGGYGYGLGLGAYGYGGYGLGYGLGLGLGHGKIW

SEQ ID NO: 5824 - protein, 22 aa, Artificial Sequence
  Synthetic
VALVSALITSFLAVRLGLALYD

SEQ ID NO: 5825 - protein, 30 aa, Artificial Sequence
  Synthetic
LAYGSRGAGGVIPPNAVLDFDVELVDIARN

SEQ ID NO: 5826 - protein, 28 aa, Artificial Sequence
  Synthetic
AVKKYLAAVLGKRYKQRVKNKGRRIAYL

SEQ ID NO: 5827 - protein, 28 aa, Artificial Sequence
  Synthetic
CDYYKGCCSGYVCSPTWKWCVRPGPGRR

SEQ ID NO: 5828 - protein, 28 aa, Artificial Sequence
  Synthetic
CDYYKGCCSGYVCSPTWKWCVRPGPGRR

SEQ ID NO: 5829 - protein, 15 aa, Artificial Sequence
  Synthetic
LGGACCGTCTDYECH

SEQ ID NO: 5830 - protein, 40 aa, Artificial Sequence
  Synthetic
DLIRAALEDADMENDPRSIIDSVKTFCCSTFNLGICCSKK

SEQ ID NO: 5831 - protein, 28 aa, Artificial Sequence
  Synthetic
AVKKYLAAVLGKRYKQRVKNKGRRIAYL

SEQ ID NO: 5832 - protein, 27 aa, Artificial Sequence
  Synthetic
CDRVAAHCFAASPYNNNNYNIDTTTRC

SEQ ID NO: 5833 - protein, 28 aa, Artificial Sequence
  Synthetic
VKGCAETCPTAGPNERVKCCRSPRCNDD

SEQ ID NO: 5834 - protein, 40 aa, Artificial Sequence
  Synthetic
GGSGGSGGNDGNDGNDGSSSRGVKLYAYDYYKDDKKGSND

SEQ ID NO: 5835 - protein, 28 aa, Artificial Sequence
  Synthetic
AVKKYLAAVLGKRYKQRVKNKGRRIPYL

SEQ ID NO: 5836 - protein, 13 aa, Artificial Sequence
  Synthetic
CTDCAQTAAANYC

SEQ ID NO: 5837 - protein, 22 aa, Artificial Sequence
  Synthetic
AAVRIYTGILTDQILSMLTGDP

SEQ ID NO: 5838 - protein, 13 aa, Artificial Sequence
  Synthetic
AGALLAGAAALLL

SEQ ID NO: 5839 - protein, 23 aa, Artificial Sequence
  Synthetic
GFCGSGDAYCGAGSCQSQCRGCR

SEQ ID NO: 5840 - protein, 18 aa, Artificial Sequence
  Synthetic
EVAKMAAELAREDAVNGK

SEQ ID NO: 5841 - protein, 36 aa, Artificial Sequence
  Synthetic
LGYGSRGAGSVIPPDADLIFETELVDIQREAVDDEL

SEQ ID NO: 5842 - protein, 32 aa, Artificial Sequence
  Synthetic
WGDNGCSLWGSCTVDAECCLGNCGGMYCSLLR

SEQ ID NO: 5843 - protein, 24 aa, Artificial Sequence
  Synthetic
ARGCGTSCPGGNHPVCCSTDLCNK

SEQ ID NO: 5844 - protein, 24 aa, Artificial Sequence
  Synthetic
ARGCGTSCPGGNHPVCCSTDLCNK

SEQ ID NO: 5845 - protein, 18 aa, Artificial Sequence
  Synthetic
CGVGTGAADKAIPRDKGK

SEQ ID NO: 5846 - protein, 33 aa, Artificial Sequence
  Synthetic
RNCGEQGEGCATRPCCAGLSCVGSRPGGLCQYD

SEQ ID NO: 5847 - protein, 24 aa, Artificial Sequence
  Synthetic
YGGYGGNGNRFPTEKACMKRCVKA

SEQ ID NO: 5848 - protein, 13 aa, Artificial Sequence
  Synthetic
AGALLAGAAALLL

SEQ ID NO: 5849 - protein, 30 aa, Artificial Sequence
  Synthetic
GYGKGGGGGGGGGGGGGGGGGGSGYVGKHE

SEQ ID NO: 5850 - protein, 21 aa, Artificial Sequence
  Synthetic
IKTAEKAAKEADQIVMIKTTD

SEQ ID NO: 5851 - protein, 28 aa, Artificial Sequence
  Synthetic
AVKKYLAAVLGKRYKQRVKNKGRRIAYL

SEQ ID NO: 5852 - protein, 32 aa, Artificial Sequence
  Synthetic
AALTAASGYLSWNDKNCGLLHYFICQTQSRGG

SEQ ID NO: 5853 - protein, 23 aa, Artificial Sequence
  Synthetic
AFLGALLSKIFGKRSLRDVDTMK

SEQ ID NO: 5854 - protein, 31 aa, Artificial Sequence
  Synthetic
ASCVADGGRSARCCTLSLLGLALVCTDPVGI

SEQ ID NO: 5855 - protein, 14 aa, Artificial Sequence
  Synthetic
CVTGAPGCVGGGRL

SEQ ID NO: 5856 - protein, 38 aa, Artificial Sequence
  Synthetic
GAVKFGGDVCAAGSVSIAGKCACGCGEYGYGLGAPYLY

SEQ ID NO: 5857 - protein, 30 aa, Artificial Sequence
  Synthetic
SYGANCIAYGDTAICECPFGYSGIRCQDPS

SEQ ID NO: 5858 - protein, 11 aa, Artificial Sequence
  Synthetic
GGGYYGGYNGY

SEQ ID NO: 5859 - protein, 34 aa, Artificial Sequence; identical to SEQ ID NO: 5822
  Synthetic

SEQ ID NO: 5860 - protein, 35 aa, Artificial Sequence
  Synthetic
AGVERLFRALVGRGCPADCPNTCDSSNECSPNFPG

SEQ ID NO: 5861 - protein, 40 aa, Artificial Sequence
  Synthetic
QSGQKACGSGGRCAVLGLCCSPDGCHADPACDAEATFSQR

SEQ ID NO: 5862 - protein, 38 aa, Artificial Sequence
  Synthetic
AGGGGGDAPAAAAEEPKKEEKSEEESDEELGFSLFDDN

SEQ ID NO: 5863 - protein, 17 aa, Artificial Sequence
  Synthetic
EGGSGVASPAQADKAEL

SEQ ID NO: 5864 - protein, 41 aa, Artificial Sequence
  Synthetic
GERCCKSGCGRFCIPGLQPLQQLKDSNLTDGFNSKLEAQAP

SEQ ID NO: 5865 - protein, 40 aa, Artificial Sequence
  Synthetic
GCGCCGGCGGCGCGCGGCGGCGCCGGCGGCGCGCGGCGCC

SEQ ID NO: 5866 - protein, 19 aa, Artificial Sequence
  Synthetic
NKAYEFANDAISSVYCEKP

SEQ ID NO: 5867 - protein, 35 aa, Artificial Sequence
  Synthetic
AGGSALYTYGDWLVILAGWSLFVSIFIVIEITRGR

SEQ ID NO: 5868 - protein, 29 aa, Artificial Sequence
  Synthetic
MNEAKSLFTTFLILAFLLFLLYAFYEAAF

SEQ ID NO: 5869 - protein, 38 aa, Artificial Sequence; identical to SEQ ID NO: 5856
  Synthetic

SEQ ID NO: 5870 - protein, 39 aa, Artificial Sequence
  Synthetic
GAVKFGGDVCAAGSVSIAGKCACGCGEGYGYGLGSPYLY

SEQ ID NO: 5871 - protein, 28 aa, Artificial Sequence
  Synthetic
AVKKYLAAVLGKRYKQRVKNKGRRIAYL

SEQ ID NO: 5872 - protein, 28 aa, Artificial Sequence
  Synthetic
ELAQALASNCGASLPVDASPTVDCTTVG

SEQ ID NO: 5873 - protein, 40 aa, Artificial Sequence
  Synthetic
GAVKFGGDVCAAGSVSIAGKCACGCGDYGYGYGLGAPYLY

SEQ ID NO: 5874 - protein, 28 aa, Artificial Sequence
  Synthetic
AVKKYLAAVLGKRYKQRVKNKGRRIPYL

SEQ ID NO: 5875 - protein, 34 aa, Artificial Sequence
  Synthetic
GRYSSMASGFRSSEHKNAYENVLEEEGRVRSTPM

SEQ ID NO: 5876 - protein, 34 aa, Artificial Sequence
  Synthetic
GRYSSMASGFRSSEHKNAFENVLEEEGRVRSTPM

SEQ ID NO: 5877 - protein, 17 aa, Artificial Sequence
  Synthetic
TAGQEGFKPVGAHIPVA

SEQ ID NO: 5878 - protein, 39 aa, Artificial Sequence
  Synthetic
GAVKFGGDVCAAGSVSIAGKCDCGCGEVYGYGLGAPYLY

SEQ ID NO: 5879 - protein, 39 aa, Artificial Sequence; identical to SEQ ID NO: 5878
  Synthetic

SEQ ID NO: 5880 - protein, 17 aa, Artificial Sequence
  Synthetic
CNTGNQCCSGWCIFLCL

SEQ ID NO: 5881 - protein, 32 aa, Artificial Sequence
  Synthetic
RDGCSSGGTFCGIRPGLCCSEFCFLWCITFID

SEQ ID NO: 5882 - protein, 29 aa, Artificial Sequence
  Synthetic
AAPGHALLSSVTLGLATSLSLLTVMALCL

SEQ ID NO: 5883 - protein, 16 aa, Artificial Sequence
  Synthetic
NNGGEFARGFNEEEIF

SEQ ID NO: 5884 - protein, 36 aa, Artificial Sequence
  Synthetic
LAYGKQGAGRVIPPDSTLIFTTELVSIDNDGDRDEL

SEQ ID NO: 5885 - protein, 41 aa, Artificial Sequence
  Synthetic
EACKNAAENGDFSIYVGAQFGRFEIWSKDSGNPAILHTYYK

SEQ ID NO: 5886 - protein, 13 aa, Artificial Sequence
  Synthetic
VGGEFLAEGGGVR

SEQ ID NO: 5887 - protein, 13 aa, Artificial Sequence
  Synthetic
VGGEFLAEGGGVR

SEQ ID NO: 5888 - protein, 13 aa, Artificial Sequence
  Synthetic
VGGEFLAEGGGVR

SEQ ID NO: 5889 - protein, 28 aa, Artificial Sequence
  Synthetic
AGAGVEAGAGAETVSSSLMIFSSFFLYN

SEQ ID NO: 5890 - protein, 36 aa, Artificial Sequence
  Synthetic
AAAAAKAAADTAAAAAKAAADTAAAAAEAAAATARG

SEQ ID NO: 5891 - protein, 23 aa, Artificial Sequence
  Synthetic
GGYGGGYGLGNGGYGGCGCGWGY

SEQ ID NO: 5892 - protein, 36 aa, Artificial Sequence
  Synthetic
GRNAAAKASGLVGLTDKRQECCSYPACNLDHPELCG

SEQ ID NO: 5893 - protein, 36 aa, Artificial Sequence; identical to SEQ ID NO: 5892
  Synthetic

SEQ ID NO: 5894 - protein, 39 aa, Artificial Sequence
  Synthetic
TGCTCGSACGSWDVRAETTCHCQCAGMDWTGARCCRVQP

SEQ ID NO: 5895 - protein, 42 aa, Artificial Sequence
  Synthetic
GGLGGGQGGGGGLGGGRGGGGYGGGGGGYGGGKYGGGKYGGK

SEQ ID NO: 5896 - protein, 42 aa, Artificial Sequence
  Synthetic
GGLGGGQGGGGGLGGGRGGGGYGGGGGGYGGGKYGGGKYGRK

SEQ ID NO: 5897 - protein, 17 aa, Artificial Sequence
  Synthetic
CDSGIQCCSGWCIFVCL

SEQ ID NO: 5898 - protein, 42 aa, Artificial Sequence
  Synthetic
IDSAYSIWASAGVANPGGNKDCVGIAARVEKTENPIACTYSS

SEQ ID NO: 5899 - protein, 34 aa, Artificial Sequence
  Synthetic
GKYSSMAASFRSSEHENAYENIPEEEGKVCSTPM

SEQ ID NO: 5900 - protein, 36 aa, Artificial Sequence
  Synthetic
AQGGGATCPGGLCCSQWGWCGSTPKYCGAGCQSNCR

SEQ ID NO: 5901 - protein, 29 aa, Artificial Sequence
  Synthetic
DCDAIAAKCFARAPYNDANWDIDTETRCQ

SEQ ID NO: 5902 - protein, 36 aa, Artificial Sequence
  Synthetic
AQGGGATCPGGLCCSQWGWCGSTPKYCGAGCQSNCK

SEQ ID NO: 5903 - protein, 17 aa, Artificial Sequence
  Synthetic
CDSGIQCCSGWCIFVCF

SEQ ID NO: 5904 - protein, 12 aa, Artificial Sequence
  Synthetic
GGEFLAEGGGVR

SEQ ID NO: 5905 - protein, 26 aa, Artificial Sequence
  Synthetic
QVLSAVSTVCSCVTTSGCAAAAAATA

SEQ ID NO: 5906 - protein, 16 aa, Artificial Sequence
  Synthetic
AVVAAWAAVAAVAAFY

SEQ ID NO: 5907 - protein, 36 aa, Artificial Sequence
  Synthetic
TVIGVGGSGCSAQTVCCENTQFNGLINIGCTPINIL

SEQ ID NO: 5908 - protein, 41 aa, Artificial Sequence
  Synthetic
VAEMYSYGGGMLVICAWVLLLTLFVVLELTRGLSRGTIRAV

SEQ ID NO: 5909 - protein, 36 aa, Artificial Sequence
  Synthetic
FGAGYGGGYGLGYGGYGGGYGLGYGGYGGCGCGCGY

SEQ ID NO: 5910 - protein, 24 aa, Artificial Sequence
  Synthetic
QLYSALANKCCHVGCTKRSLARFC

SEQ ID NO: 5911 - protein, 12 aa, Artificial Sequence
  Synthetic
VGGGGGGGGGGA

SEQ ID NO: 5912 - protein, 17 aa, Artificial Sequence
  Synthetic
CNTGNQCCSGWCIFVCL

SEQ ID NO: 5913 - protein, 17 aa, Artificial Sequence
  Synthetic
CNTGNQCCSGWCIFVCL

SEQ ID NO: 5914 - protein, 34 aa, Artificial Sequence
  Synthetic
GRYSSVAASFRSSEHENAYENVPEEEGKVRSTPM

SEQ ID NO: 5915 - protein, 33 aa, Artificial Sequence
  Synthetic
AAAAAALTAANAKAAAELTAANAAAAAAATARG

SEQ ID NO: 5916 - protein, 41 aa, Artificial Sequence
  Synthetic
MKDFTTYLSTAPVLTLVSLTAVAGLLIEINRFFPDALTAAF

SEQ ID NO: 5917 - protein, 28 aa, Artificial Sequence
  Synthetic
SSGNKGGAAGLGFIMWLGVSLVMMMFLI

SEQ ID NO: 5918 - protein, 12 aa, Artificial Sequence
  Synthetic
GGEFLAEGGGVR

SEQ ID NO: 5919 - protein, 38 aa, Artificial Sequence
  Synthetic
DLIRAALEDADTKNDPRLLDYVTGACCAGLNFVCCGKK

SEQ ID NO: 5920 - protein, 20 aa, Artificial Sequence
  Synthetic
CKKAGHKGGTCDFFKCKCKV

SEQ ID NO: 5921 - protein, 34 aa, Artificial Sequence
  Synthetic
GRYSSMAASFRSSEHENAYENVPEEEGKVRSTPM

SEQ ID NO: 5922 - protein, 14 aa, Artificial Sequence
  Synthetic
ADNAAAAAAATARG

SEQ ID NO: 5923 - protein, 11 aa, Artificial Sequence
  Synthetic
VGGGGGGGGGA

SEQ ID NO: 5924 - protein, 11 aa, Artificial Sequence
  Synthetic
VGGGGGGGGGA

SEQ ID NO: 5925 - protein, 34 aa, Artificial Sequence
  Synthetic
CGSGGRCAATGICCSPDGCRTDPACDPESAFSER

SEQ ID NO: 5926 - protein, 20 aa, Artificial Sequence
  Synthetic
CKKAGHRGGTCEFFKCKCKV

SEQ ID NO: 5927 - protein, 23 aa, Artificial Sequence
  Synthetic
SCVNFGNGFCGDNCGNSWACSGC

SEQ ID NO: 5928 - protein, 22 aa, Artificial Sequence
  Synthetic
ITSAGSSVTAYLQYRRGDQLDI

SEQ ID NO: 5929 - protein, 36 aa, Artificial Sequence
  Synthetic
NGVSLLSACGGWELIFSGWILFLTIFVVLEVTRGEH

SEQ ID NO: 5930 - protein, 34 aa, Artificial Sequence
  Synthetic
CGSGGRCATAGICCSPDGCRTDPACDPESAFSER

SEQ ID NO: 5931 - protein, 34 aa, Artificial Sequence
  Synthetic
CGSGGRCAAAGICCSPDGCHADPACDPEAAFSQH

SEQ ID NO: 5932 - protein, 34 aa, Artificial Sequence
  Synthetic
CGSGGRCAAAGICCSPDGCHEDPACDPEAAFSQH

SEQ ID NO: 5933 - protein, 39 aa, Artificial Sequence
  Synthetic
AAASAGIRPGRYEQAAVIGYDLDASYNGHSRGGYGRGGY

SEQ ID NO: 5934 - protein, 29 aa, Artificial Sequence
  Synthetic
ECDAIAAKCFAKAPYNDANWDIDTETRCQ

SEQ ID NO: 5935 - protein, 34 aa, Artificial Sequence
  Synthetic
GKYSSMAASFRSNEHENAYENTSEEEGRVHSTPM

SEQ ID NO: 5936 - protein, 29 aa, Artificial Sequence
  Synthetic
ECDAIAAKCFAKAPYNDANWDIDTETRCQ

SEQ ID NO: 5937 - protein, 26 aa, Artificial Sequence
  Synthetic
QEGKDIATECCGNQCSDDYIRSACCP

SEQ ID NO: 5938 - protein, 28 aa, Artificial Sequence
  Synthetic
VATVGGLAAGGLLILFVFGSYSGLGSSL

SEQ ID NO: 5939 - protein, 20 aa, Artificial Sequence
  Synthetic
CKKAGHRGGTCDFFKCKCKV

SEQ ID NO: 5940 - protein, 35 aa, Artificial Sequence
  Synthetic
AAAAPGAAGGAQLPLGNRERKAGCKNFFWKTFSSC

SEQ ID NO: 5941 - protein, 15 aa, Artificial Sequence
  Synthetic
GIVAAYIAYYGPIQF

SEQ ID NO: 5942 - protein, 39 aa, Artificial Sequence
  Synthetic
CNTWGGNYSGGECADSSFPGLSICYCCHYVGSSAEMESM

SEQ ID NO: 5943 - protein, 11 aa, Artificial Sequence
  Synthetic
VGGGGGGGGGG

SEQ ID NO: 5944 - protein, 11 aa, Artificial Sequence
  Synthetic
VGGGGGGGGGG

SEQ ID NO: 5945 - protein, 41 aa, Artificial Sequence
  Synthetic
MTNFTTYLSTAPVVALIWFTFTAGLLIEINRFFPDPLVFSF

SEQ ID NO: 5946 - protein, 36 aa, Artificial Sequence
  Synthetic
YGGCGGNANNFETRDQCRHTCGASGNVGPRPRIASN

SEQ ID NO: 5947 - protein, 36 aa, Artificial Sequence
  Synthetic
ASDGRNAAANAKTPRLIAPFIRDYCCHRGPCMVWCG

SEQ ID NO: 5948 - protein, 36 aa, Artificial Sequence; identical to SEQ ID NO: 5947
  Synthetic

SEQ ID NO: 5949 - protein, 19 aa, Artificial Sequence
  Synthetic
VSAGVAAVAALVFGSALRI

SEQ ID NO: 5950 - protein, 17 aa, Artificial Sequence
  Synthetic
QYAAGVAALAAGALLAL

SEQ ID NO: 5951 - protein, 41 aa, Artificial Sequence
  Synthetic
GTAVGKLLTWGGLGIWWFVDLILLITGGLMPSDNSNWCTIY

SEQ ID NO: 5952 - protein, 30 aa, Artificial Sequence
  Synthetic
CDWIGTYGDACLCYALPDNVPIKLSGECHR

SEQ ID NO: 5953 - protein, 32 aa, Artificial Sequence
  Synthetic
AAAAAALTAAGAAAAAKLTAGGAAAAAAATAA

SEQ ID NO: 5954 - protein, 40 aa, Artificial Sequence
  Synthetic
AATAAAAAAATAATAAKAAALTAANAAAAAAATAAAAARG

SEQ ID NO: 5955 - protein, 18 aa, Artificial Sequence
  Synthetic
KAAVGMGAGALAAAAMLL

SEQ ID NO: 5956 - protein, 41 aa, Artificial Sequence
  Synthetic
GTAVGKLLTLGGLGIWWFVDLILLITGGLMPSDNSNWCTIY

SEQ ID NO: 5957 - protein, 35 aa, Artificial Sequence
  Synthetic
GGTGAFRFARGYALPKTYKIVGLDAVVEYNVFIWH

SEQ ID NO: 5958 - protein, 23 aa, Artificial Sequence
  Synthetic
SGAANYLTSFSIGTFFVFVLGLI

SEQ ID NO: 5959 - protein, 33 aa, Artificial Sequence
  Synthetic
CGSDGITYGNACMLLGASCRSDTPIELVHKGRC

SEQ ID NO: 5960 - protein, 18 aa, Artificial Sequence
  Synthetic
SGFASALTFGSGTKVIVL

SEQ ID NO: 5961 - protein, 18 aa, Artificial Sequence
  Synthetic
LSGAHEACKTVSCGNPCA

SEQ ID NO: 5962 - protein, 40 aa, Artificial Sequence
  Synthetic
ASDGRNAAANVKAPDLIALTVRNDCCHNAPCRNNHPGICG

SEQ ID NO: 5963 - protein, 21 aa, Artificial Sequence
  Synthetic
SGAAEGESGVASPAQADKAEL

SEQ ID NO: 5964 - protein, 12 aa, Artificial Sequence
  Synthetic
NGGSGGSNGYHY

SEQ ID NO: 5965 - protein, 31 aa, Artificial Sequence
  Synthetic
GGGGSPGHGAGGGYPGGHGGGHHGGYQTHGY

SEQ ID NO: 5966 - protein, 39 aa, Artificial Sequence
  Synthetic
LTNVQTILNGGPVTEDLRCNRVRLFVNVLDFIVQTPQIG

SEQ ID NO: 5967 - protein, 26 aa, Artificial Sequence
  Synthetic
NVGAGGCAKAGLLGILGISICADIHV

SEQ ID NO: 5968 - protein, 14 aa, Artificial Sequence
  Synthetic
GTAVAGALYAVVLA

SEQ ID NO: 5969 - protein, 41 aa, Artificial Sequence
  Synthetic
VASATSGGGGGGGAPAAESKKEEKKEEKEESDDDMGFSLFE

SEQ ID NO: 5970 - protein, 27 aa, Artificial Sequence
  Synthetic
TSGAAAGCGFMAFLEVSVAMLMFLIWL

SEQ ID NO: 5971 - protein, 40 aa, Artificial Sequence
  Synthetic
GLGAGGLQPLALEMALQKRGIVDQCCTGTCTRHQLQSYCN

SEQ ID NO: 5972 - protein, 42 aa, Artificial Sequence
  Synthetic
ATAATAAAAAAATAVTAAKAAALTAANAAAAAAATAAAAARG

SEQ ID NO: 5973 - protein, 15 aa, Artificial Sequence
  Synthetic
AVSVAAAALGGYLFC

SEQ ID NO: 5974 - protein, 30 aa, Artificial Sequence
  Synthetic
ADSAKSGAAALGVSAVVVGVTSIAGSFLLL

SEQ ID NO: 5975 - protein, 42 aa, Artificial Sequence
  Synthetic
GAGNGGNGGGGNGGNGGGGNGGNNGNGNGNNGLKKYETCYDC

SEQ ID NO: 5976 - protein, 33 aa, Artificial Sequence
  Synthetic
ATDGRNAAANARVSPVISKSSKKWCHPNPYTVG

SEQ ID NO: 5977 - protein, 17 aa, Artificial Sequence
  Synthetic
LSIAGTVAAAGFFIFSL

SEQ ID NO: 5978 - protein, 41 aa, Artificial Sequence
  Synthetic
VASATSGGGGGGGASAAESKKEEKKEEKEESDDDMGFSLFE

SEQ ID NO: 5979 - protein, 40 aa, Artificial Sequence
  Synthetic
HGGGYGSGGGGGGGGGQGGGSGSGSGSGYGSGSGGGNGHH

SEQ ID NO: 5980 - protein, 40 aa, Artificial Sequence; identical to SEQ ID NO: 5979
  Synthetic

SEQ ID NO: 5981 - protein, 26 aa, Artificial Sequence
  Synthetic
EVGTGGCAKVGILGILGISICGGIHL

SEQ ID NO: 5982 - protein, 30 aa, Artificial Sequence
  Synthetic
ADSADSGAAALGVSAVVVGVTSIVGSFLFF

SEQ ID NO: 5983 - protein, 38 aa, Artificial Sequence
  Synthetic
APAAAGAAAGGAAAPAAEEKKEEEKEESDEDMGFGLFD

SEQ ID NO: 5984 - protein, 23 aa, Artificial Sequence
  Synthetic
LHALGTRCCSWDVCDHPSCTCCG

SEQ ID NO: 5985 - protein, 41 aa, Artificial Sequence
  Synthetic
GNRVKTGGTAVLINDNGEVNETIVGDNPPKFEESRKESSSN

SEQ ID NO: 5986 - protein, 20 aa, Artificial Sequence
  Synthetic
LGTCYTTGCTCNKYRVCTKD

SEQ ID NO: 5987 - protein, 25 aa, Artificial Sequence
  Synthetic
SGMSDGTSCGDTGVCQNGLCMGAGS

SEQ ID NO: 5988 - protein, 38 aa, Artificial Sequence
  Synthetic
AAAAGGASAAAGGEATEEAAEEEAAEESDDDMSFGLFD

SEQ ID NO: 5989 - protein, 39 aa, Artificial Sequence
  Synthetic
GCGSGCKCGDSCSCEKNYNTECDSCSCGSNCSCGDSCSC

SEQ ID NO: 5990 - protein, 29 aa, Artificial Sequence
  Synthetic
EQYRGGAGRGKHNQATEENVQDCGEITGW

SEQ ID NO: 5991 - protein, 38 aa, Artificial Sequence
  Synthetic
SAAAGAAGAAAGGDAAEEEKEEEAKEESDDDMGFGLFD

SEQ ID NO: 5992 - protein, 42 aa, Artificial Sequence
  Synthetic
AGAASAGGAAAAGGAAEAAPEAERAEEEKEESDDDMGFGLFD

SEQ ID NO: 5993 - protein, 27 aa, Artificial Sequence
  Synthetic
TWATTIIALLTFGLIYEWTQGGLEWAE

SEQ ID NO: 5994 - protein, 24 aa, Artificial Sequence
  Synthetic
CKKAGHNGGTCMFFKCMCVNSKMN

SEQ ID NO: 5995 - protein, 41 aa, Artificial Sequence
  Synthetic
GGAAAAGGAAAAGGAAEAAPEEAKEEEKEESDDDMGFGLFD

SEQ ID NO: 5996 - protein, 22 aa, Artificial Sequence
  Synthetic
AHSIAHSAAYPAYTAPLTYAAP

SEQ ID NO: 5997 - protein, 39 aa, Artificial Sequence
  Synthetic
VAAAAPAAGGAAPAAEAKKEEKVEEKEESDDDMGFSLFD

SEQ ID NO: 5998 - protein, 33 aa, Artificial Sequence
  Synthetic
SGGGGAAAPAEKKEAKKEEKEESDDDMGFSLFE

SEQ ID NO: 5999 - protein, 34 aa, Artificial Sequence
  Synthetic
SGFGVGDSACAAHCIARRNRGGYCNAKKVCVCRN

SEQ ID NO: 6000 - protein, 13 aa, Artificial Sequence
  Synthetic
ASAGAGTGSGYHY

SEQ ID NO: 6001 - protein, 31 aa, Artificial Sequence
  Synthetic
AATAATAATAATAATAATAATAATAATAATA

SEQ ID NO: 6002 - protein, 22 aa, Artificial Sequence
  Synthetic
SSWKDVVEYLLQVVNMKESAPS

SEQ ID NO: 6003 - protein, 23 aa, Artificial Sequence
  Synthetic
STLEDFLERLKTIMKEKYSKCRS

SEQ ID NO: 6004 - protein, 34 aa, Artificial Sequence
  Synthetic
KIAEKVAEKVAEAADVVKKVAQDTDGDAQAHDEL

SEQ ID NO: 6005 - protein, 34 aa, Artificial Sequence
  Synthetic
SSATTLLDKIDEAIEQSISLCMDSAELLFRCLGC

SEQ ID NO: 6006 - protein, 27 aa, Artificial Sequence
  Synthetic
REVDRLASDLQRLAKFQQHSTKHYGFL

SEQ ID NO: 6007 - protein, 35 aa, Artificial Sequence
  Synthetic
ISDMKDALEEMKRILNQFQVGNSLLFVFGRRERRC

SEQ ID NO: 6008 - protein, 25 aa, Artificial Sequence
  Synthetic
FNSIINRFHDVVNHFTKTTTTTTDV

SEQ ID NO: 6009 - protein, 17 aa, Artificial Sequence
  Synthetic
NQCWSQLTECVKNCPCL

SEQ ID NO: 6010 - protein, 26 aa, Artificial Sequence
  Synthetic
LANNLKNAAEQVAEPATHEHSGHAEL

SEQ ID NO: 6011 - protein, 23 aa, Artificial Sequence
  Synthetic
NNIFNNISRCFSYCSRTCLKRTR

SEQ ID NO: 6012 - protein, 32 aa, Artificial Sequence
  Synthetic
EVANSLNRAVHRAVREESGSRRKLLGLHKKFA

SEQ ID NO: 6013 - protein, 30 aa, Artificial Sequence
  Synthetic
VDQCKKLLKKIVDTCPGGGYDHTKDGWKSK

SEQ ID NO: 6014 - protein, 14 aa, Artificial Sequence
  Synthetic
QHCISTANTMLRKL

SEQ ID NO: 6015 - protein, 35 aa, Artificial Sequence
  Synthetic
TLLETLIKNCGDFVHMHVAERDILHEMVKIVKKKV

SEQ ID NO: 6016 - protein, 27 aa, Artificial Sequence
  Synthetic
CQHLVTAFKTWFRRASRDPQGPQGGED

SEQ ID NO: 6017 - protein, 15 aa, Artificial Sequence
  Synthetic
LSDLLKRVSDLLRSL

SEQ ID NO: 6018 - protein, 27 aa, Artificial Sequence
  Synthetic
YALSKLANVLHTAALAGRLREMGADVT

SEQ ID NO: 6019 - protein, 18 aa, Artificial Sequence
  Synthetic
VIKCFKEIIEHASQLLAS

SEQ ID NO: 6020 - protein, 14 aa, Artificial Sequence
  Synthetic
HIMSDLIQELNTCI

SEQ ID NO: 6021 - protein, 27 aa, Artificial Sequence
  Synthetic
EEFLSVVERFLQRAFGTPDEHVFQAAV

SEQ ID NO: 6022 - protein, 34 aa, Artificial Sequence
  Synthetic
EGWSSLLRTVHSVLDRSPPLLIAEIILVDDFSDK

SEQ ID NO: 6023 - protein, 25 aa, Artificial Sequence
  Synthetic
IETCIENVGELLRTNFGKDVLYEVA

SEQ ID NO: 6024 - protein, 31 aa, Artificial Sequence
  Synthetic
REIDDVARELEEMLRAAMIKAAGRERDYDWL

SEQ ID NO: 6025 - protein, 32 aa, Artificial Sequence
  Synthetic
VDDILSTMIDKFHEAFLTQDEVMYESAIDNKK

SEQ ID NO: 6026 - protein, 29 aa, Artificial Sequence
  Synthetic
ASSCFNNVNDVLRQDVEVVEYLNDLMDTF

SEQ ID NO: 6027 - protein, 30 aa, Artificial Sequence; identical to SEQ ID NO: 4939
  Synthetic

SEQ ID NO: 6028 - protein, 32 aa, Artificial Sequence
  Synthetic
LVRRLDEFLNQVNHLLVPGTSTKITWIESVCL

SEQ ID NO: 6029 - protein, 15 aa, Artificial Sequence
  Synthetic
FFYYLYSMVYTLVSF

SEQ ID NO: 6030 - protein, 12 aa, Artificial Sequence
  Synthetic
KMLSRFGRFWKK

SEQ ID NO: 6031 - protein, 12 aa, Artificial Sequence
  Synthetic
RAGRKAVKRFLK

SEQ ID NO: 6032 - protein, 11 aa, Artificial Sequence
  Synthetic
RVRRLCRGLAR

SEQ ID NO: 6033 - protein, 12 aa, Artificial Sequence
  Synthetic
RIVRKVARNLGK

SEQ ID NO: 6034 - protein, 11 aa, Artificial Sequence
  Synthetic
RCRRALRRFFA

SEQ ID NO: 6035 - protein, 12 aa, Artificial Sequence
  Synthetic
KTFWKKYRTFWK

SEQ ID NO: 6036 - protein, 12 aa, Artificial Sequence
  Synthetic
VGKILKKINKAI

SEQ ID NO: 6037 - protein, 12 aa, Artificial Sequence
  Synthetic
GRKVCAKLVKRL

SEQ ID NO: 6038 - protein, 12 aa, Artificial Sequence
  Synthetic
RLVKHWYQNCKK

SEQ ID NO: 6039 - protein, 12 aa, Artificial Sequence
  Synthetic
RGLEKYFRKLSK

SEQ ID NO: 6040 - protein, 12 aa, Artificial Sequence
  Synthetic
KRIVQRIKDFLR

SEQ ID NO: 6041 - protein, 12 aa, Artificial Sequence
  Synthetic
KRYGGFMRRVGR

SEQ ID NO: 6042 - protein, 11 aa, Artificial Sequence
  Synthetic
YKRCARLLTRL

SEQ ID NO: 6043 - protein, 11 aa, Artificial Sequence
  Synthetic
YKRCARLLTRL

SEQ ID NO: 6044 - protein, 12 aa, Artificial Sequence
  Synthetic
LYKRYGGFLRRI

SEQ ID NO: 6045 - protein, 12 aa, Artificial Sequence
  Synthetic
RKLFRVYSNFLR

SEQ ID NO: 6046 - protein, 12 aa, Artificial Sequence
  Synthetic
KAIKNLLKAVSK

SEQ ID NO: 6047 - protein, 12 aa, Artificial Sequence
  Synthetic
HLLARIWKPYKK

SEQ ID NO: 6048 - protein, 12 aa, Artificial Sequence
  Synthetic
HLLARIWKPYKK

SEQ ID NO: 6049 - protein, 11 aa, Artificial Sequence
  Synthetic
KVGRKVFSKLR

SEQ ID NO: 6050 - protein, 12 aa, Artificial Sequence
  Synthetic
RGIRPVGRFGRR

SEQ ID NO: 6051 - protein, 12 aa, Artificial Sequence
  Synthetic
WLRIARRALRFV

SEQ ID NO: 6052 - protein, 12 aa, Artificial Sequence
  Synthetic
FMKRYGGFMKKM

SEQ ID NO: 6053 - protein, 12 aa, Artificial Sequence
  Synthetic
KCFNKVTGYCRK

SEQ ID NO: 6054 - protein, 12 aa, Artificial Sequence
  Synthetic
SICRKARRLAGR

SEQ ID NO: 6055 - protein, 12 aa, Artificial Sequence
  Synthetic
SICRKARRLAGR

SEQ ID NO: 6056 - protein, 12 aa, Artificial Sequence
  Synthetic
KRYYGRILHYLK

SEQ ID NO: 6057 - protein, 12 aa, Artificial Sequence
  Synthetic
KKWVQKYISLLK

SEQ ID NO: 6058 - protein, 11 aa, Artificial Sequence
  Synthetic
RWRDVCRNFMR

SEQ ID NO: 6059 - protein, 12 aa, Artificial Sequence
  Synthetic
RRYFHRIDNFLK

SEQ ID NO: 6060 - protein, 11 aa, Artificial Sequence
  Synthetic
VKLLKRIYDKL

SEQ ID NO: 6061 - protein, 12 aa, Artificial Sequence
  Synthetic
KWVQNYMKHLGR

SEQ ID NO: 6062 - protein, 11 aa, Artificial Sequence
  Synthetic
LKTIRNGVHKI

SEQ ID NO: 6063 - protein, 11 aa, Artificial Sequence
  Synthetic
KFVKVFSRIFG

SEQ ID NO: 6064 - protein, 12 aa, Artificial Sequence
  Synthetic
ICNEGKKCCRRW

SEQ ID NO: 6065 - protein, 11 aa, Artificial Sequence
  Synthetic
IKRLQRLLQAL

SEQ ID NO: 6066 - protein, 12 aa, Artificial Sequence
  Synthetic
RRICSTYRTMYR

SEQ ID NO: 6067 - protein, 11 aa, Artificial Sequence
  Synthetic
LRNLFRKLISF

SEQ ID NO: 6068 - protein, 11 aa, Artificial Sequence
  Synthetic
EYYRRLLRVLR

SEQ ID NO: 6069 - protein, 12 aa, Artificial Sequence
  Synthetic
ARHFWSKICKPV

SEQ ID NO: 6070 - protein, 12 aa, Artificial Sequence
  Synthetic
HFWKQVLGGLRK

SEQ ID NO: 6071 - protein, 11 aa, Artificial Sequence
  Synthetic
KVHGLLKTFVR

SEQ ID NO: 6072 - protein, 12 aa, Artificial Sequence
  Synthetic
IHTLIKAGKKCL

SEQ ID NO: 6073 - protein, 11 aa, Artificial Sequence
  Synthetic
KVHGLLKTFVK

SEQ ID NO: 6074 - protein, 12 aa, Artificial Sequence
  Synthetic
RFMHSVGRVFSK

SEQ ID NO: 6075 - protein, 11 aa, Artificial Sequence
  Synthetic
KFGKNIANMCR

SEQ ID NO: 6076 - protein, 12 aa, Artificial Sequence
  Synthetic
ARHFWTKICKPV

SEQ ID NO: 6077 - protein, 12 aa, Artificial Sequence
  Synthetic
ARHFWTKICKPV

SEQ ID NO: 6078 - protein, 11 aa, Artificial Sequence
  Synthetic
IRAYLKTIRQL

SEQ ID NO: 6079 - protein, 12 aa, Artificial Sequence
  Synthetic
KKAVGGLGKLGK

SEQ ID NO: 6080 - protein, 12 aa, Artificial Sequence
  Synthetic
RFYSRVLSPLHR

SEQ ID NO: 6081 - protein, 12 aa, Artificial Sequence
  Synthetic
CRALIKRIQAMI

SEQ ID NO: 6082 - protein, 12 aa, Artificial Sequence
  Synthetic
AYGRCWHVLKKV

SEQ ID NO: 6083 - protein, 11 aa, Artificial Sequence
  Synthetic
RFKSLLQKMIH

SEQ ID NO: 6084 - protein, 11 aa, Artificial Sequence
  Synthetic
KVVKLIKNYLQ

SEQ ID NO: 6085 - protein, 11 aa, Artificial Sequence
  Synthetic
KYMSWINKVIR

SEQ ID NO: 6086 - protein, 12 aa, Artificial Sequence
  Synthetic
RECLRRGRALGR

SEQ ID NO: 6087 - protein, 11 aa, Artificial Sequence
  Synthetic
GRTAVRRFLKL

SEQ ID NO: 6088 - protein, 12 aa, Artificial Sequence
  Synthetic
VQRVVEKFLKRA

SEQ ID NO: 6089 - protein, 11 aa, Artificial Sequence
  Synthetic
KGLAKMAKAWA

SEQ ID NO: 6090 - protein, 12 aa, Artificial Sequence
  Synthetic
VKKIIEKMLKNG

SEQ ID NO: 6091 - protein, 12 aa, Artificial Sequence
  Synthetic
AREVMKACRRAF

SEQ ID NO: 6092 - protein, 12 aa, Artificial Sequence
  Synthetic
AREVMKACRRAF

SEQ ID NO: 6093 - protein, 12 aa, Artificial Sequence
  Synthetic
AREVMKACRRAF

SEQ ID NO: 6094 - protein, 12 aa, Artificial Sequence
  Synthetic
RLVSKALNMWGK

SEQ ID NO: 6095 - protein, 11 aa, Artificial Sequence
  Synthetic
KFVKNVIAGIR

SEQ ID NO: 6096 - protein, 11 aa, Artificial Sequence
  Synthetic
GKDCSKLGKKC

SEQ ID NO: 6097 - protein, 12 aa, Artificial Sequence
  Synthetic
FCKAIVKSGGKI

SEQ ID NO: 6098 - protein, 12 aa, Artificial Sequence
  Synthetic
RKLYTIMNSFCR

SEQ ID NO: 6099 - protein, 11 aa, Artificial Sequence
  Synthetic
LQKALHHLSRL

SEQ ID NO: 6100 - protein, 12 aa, Artificial Sequence
  Synthetic
ARKIPKVGHTFF

SEQ ID NO: 6101 - protein, 12 aa, Artificial Sequence
  Synthetic
KILRKISSIANS

SEQ ID NO: 6102 - protein, 12 aa, Artificial Sequence
  Synthetic
WRRALRAAAGPL

SEQ ID NO: 6103 - protein, 11 aa, Artificial Sequence
  Synthetic
DCKRACAKALK

SEQ ID NO: 6104 - protein, 11 aa, Artificial Sequence
  Synthetic
ARPVKNGCRGI

SEQ ID NO: 6105 - protein, 11 aa, Artificial Sequence
  Synthetic
CARLRHVARGI

SEQ ID NO: 6106 - protein, 12 aa, Artificial Sequence
  Synthetic
LKTAFERLCRHC

SEQ ID NO: 6107 - protein, 12 aa, Artificial Sequence
  Synthetic
AQYGKPIKNMCR

SEQ ID NO: 6108 - protein, 11 aa, Artificial Sequence
  Synthetic
AALTRALRRLQ

SEQ ID NO: 6109 - protein, 12 aa, Artificial Sequence
  Synthetic
FFRVLKKILDSL

SEQ ID NO: 6110 - protein, 12 aa, Artificial Sequence
  Synthetic
KVMRWFQAMLQR

SEQ ID NO: 6111 - protein, 12 aa, Artificial Sequence
  Synthetic
GHHFVRALVRVC

SEQ ID NO: 6112 - protein, 11 aa, Artificial Sequence
  Synthetic
MKCCRNGCGKV

SEQ ID NO: 6113 - protein, 12 aa, Artificial Sequence
  Synthetic
FQNCPRGGKRAM

SEQ ID NO: 6114 - protein, 12 aa, Artificial Sequence
  Synthetic
CRRIKQAFQGAV

SEQ ID NO: 6115 - protein, 11 aa, Artificial Sequence
  Synthetic
IKPCKSVCQRA

SEQ ID NO: 6116 - protein, 11 aa, Artificial Sequence
  Synthetic
KFIKNAVAGVR

SEQ ID NO: 6117 - protein, 12 aa, Artificial Sequence
  Synthetic
ISSARKLCGRYL

SEQ ID NO: 6118 - protein, 12 aa, Artificial Sequence
  Synthetic
CKEFLNRFYKSL

SEQ ID NO: 6119 - protein, 12 aa, Artificial Sequence
  Synthetic
KAGLQVYNKCWK

SEQ ID NO: 6120 - protein, 11 aa, Artificial Sequence
  Synthetic
RGQRVGSRVGR

SEQ ID NO: 6121 - protein, 11 aa, Artificial Sequence
  Synthetic
LRRLHHACQGA

SEQ ID NO: 6122 - protein, 11 aa, Artificial Sequence
  Synthetic
CHRCRGLVDKF

SEQ ID NO: 6123 - protein, 11 aa, Artificial Sequence
  Synthetic
LARYIQQARKA

SEQ ID NO: 6124 - protein, 11 aa, Artificial Sequence
  Synthetic
LARYIQQARKA

SEQ ID NO: 6125 - protein, 11 aa, Artificial Sequence
  Synthetic
VNRCKKCGATC

SEQ ID NO: 6126 - protein, 11 aa, Artificial Sequence
  Synthetic
HCAKRIVSGAR

SEQ ID NO: 6127 - protein, 12 aa, Artificial Sequence
  Synthetic
LKRLLQEIKTCW

SEQ ID NO: 6128 - protein, 11 aa, Artificial Sequence
  Synthetic
GISSIIKHYLK

SEQ ID NO: 6129 - protein, 12 aa, Artificial Sequence
  Synthetic
RCLSPMNHLCHK

SEQ ID NO: 6130 - protein, 11 aa, Artificial Sequence
  Synthetic
LKGLVQKGVKV

SEQ ID NO: 6131 - protein, 12 aa, Artificial Sequence
  Synthetic
NGFQLLRHAVKR

SEQ ID NO: 6132 - protein, 12 aa, Artificial Sequence
  Synthetic
NGFQLLRHAVKR

SEQ ID NO: 6133 - protein, 12 aa, Artificial Sequence
  Synthetic
RTIGATMVRLVK

SEQ ID NO: 6134 - protein, 11 aa, Artificial Sequence
  Synthetic
CGRICRDIPKG

SEQ ID NO: 6135 - protein, 12 aa, Artificial Sequence
  Synthetic
RHLARTLLTAAR

SEQ ID NO: 6136 - protein, 11 aa, Artificial Sequence
  Synthetic
QLLRGWQQMFK

SEQ ID NO: 6137 - protein, 12 aa, Artificial Sequence
  Synthetic
RGGLRYMGKLVG

SEQ ID NO: 6138 - protein, 11 aa, Artificial Sequence
  Synthetic
MKKYSQILSHF

SEQ ID NO: 6139 - protein, 12 aa, Artificial Sequence
  Synthetic
RLIGELAKEIRK

SEQ ID NO: 6140 - protein, 11 aa, Artificial Sequence
  Synthetic
LKKVIQKILDG

SEQ ID NO: 6141 - protein, 11 aa, Artificial Sequence
  Synthetic
LNLAHNILRKM

SEQ ID NO: 6142 - protein, 12 aa, Artificial Sequence
  Synthetic
KELVHTYKGCIR

SEQ ID NO: 6143 - protein, 12 aa, Artificial Sequence
  Synthetic
VQRLTRACHQAM

SEQ ID NO: 6144 - protein, 12 aa, Artificial Sequence
  Synthetic
HRACSTYRTIYR

SEQ ID NO: 6145 - protein, 12 aa, Artificial Sequence
  Synthetic
LRKALDNLARQM

SEQ ID NO: 6146 - protein, 12 aa, Artificial Sequence
  Synthetic
LNRYYASLRHYL

SEQ ID NO: 6147 - protein, 11 aa, Artificial Sequence
  Synthetic
RAVSNMLQKAR

SEQ ID NO: 6148 - protein, 11 aa, Artificial Sequence
  Synthetic
ISRIYGKWYNL

SEQ ID NO: 6149 - protein, 12 aa, Artificial Sequence
  Synthetic
FKSFWQKLFAIF

SEQ ID NO: 6150 - protein, 11 aa, Artificial Sequence
  Synthetic
RYLDWIKKIIG

SEQ ID NO: 6151 - protein, 12 aa, Artificial Sequence
  Synthetic
MKKVHALWASVC

SEQ ID NO: 6152 - protein, 11 aa, Artificial Sequence
  Synthetic
AGSAKNIWKRA

SEQ ID NO: 6153 - protein, 11 aa, Artificial Sequence
  Synthetic
RVLAQLLRVWG

SEQ ID NO: 6154 - protein, 11 aa, Artificial Sequence
  Synthetic
LNYYRNLFRNF

SEQ ID NO: 6155 - protein, 11 aa, Artificial Sequence
  Synthetic
VSQLQGLWRRF

SEQ ID NO: 6156 - protein, 11 aa, Artificial Sequence
  Synthetic
IQKIFASCWRL

SEQ ID NO: 6157 - protein, 11 aa, Artificial Sequence
  Synthetic
QAANKWGRSGR

SEQ ID NO: 6158 - protein, 11 aa, Artificial Sequence
  Synthetic
GGNVGRKMKSL

SEQ ID NO: 6159 - protein, 12 aa, Artificial Sequence
  Synthetic
YSQYLERLRRFI

SEQ ID NO: 6160 - protein, 12 aa, Artificial Sequence
  Synthetic
SALRHYINLITR

SEQ ID NO: 6161 - protein, 11 aa, Artificial Sequence
  Synthetic
MKPIQKLLAGL

SEQ ID NO: 6162 - protein, 12 aa, Artificial Sequence
  Synthetic
WGRSYCRALERL

SEQ ID NO: 6163 - protein, 12 aa, Artificial Sequence
  Synthetic
KIYNVINNLVNK

SEQ ID NO: 6164 - protein, 12 aa, Artificial Sequence
  Synthetic
LKKVIQKILDSG

SEQ ID NO: 6165 - protein, 12 aa, Artificial Sequence
  Synthetic
RSFRNGVGTGMK

SEQ ID NO: 6166 - protein, 11 aa, Artificial Sequence
  Synthetic
RACQQFLKQCQ

SEQ ID NO: 6167 - protein, 12 aa, Artificial Sequence
  Synthetic
RAAAAWYRPAGR

SEQ ID NO: 6168 - protein, 12 aa, Artificial Sequence
  Synthetic
VQKIIEKILNKG

SEQ ID NO: 6169 - protein, 12 aa, Artificial Sequence
  Synthetic
GSRILRFINSFI

SEQ ID NO: 6170 - protein, 11 aa, Artificial Sequence
  Synthetic
GGRLSRVLREL

SEQ ID NO: 6171 - protein, 11 aa, Artificial Sequence
  Synthetic
QLKKCWNNYVQ

SEQ ID NO: 6172 - protein, 11 aa, Artificial Sequence
  Synthetic
SLVKNGVKILH

SEQ ID NO: 6173 - protein, 11 aa, Artificial Sequence
  Synthetic
SLVKNGVKILH

SEQ ID NO: 6174 - protein, 11 aa, Artificial Sequence
  Synthetic
KFVNSVINTLK

SEQ ID NO: 6175 - protein, 11 aa, Artificial Sequence
  Synthetic
SMLGFIGKLFR

SEQ ID NO: 6176 - protein, 12 aa, Artificial Sequence
  Synthetic
YPKGFRGYCNGL

SEQ ID NO: 6177 - protein, 12 aa, Artificial Sequence
  Synthetic
RLLRRLEDAARQ

SEQ ID NO: 6178 - protein, 12 aa, Artificial Sequence
  Synthetic
KMYNVINNLVNK

SEQ ID NO: 6179 - protein, 11 aa, Artificial Sequence
  Synthetic
KAKNLIERFFN

SEQ ID NO: 6180 - protein, 11 aa, Artificial Sequence
  Synthetic
VKKYLNSILNG

SEQ ID NO: 6181 - protein, 11 aa, Artificial Sequence
  Synthetic
EFAQKLLKKFS

SEQ ID NO: 6182 - protein, 11 aa, Artificial Sequence
  Synthetic
MNVWGSVWRRA

SEQ ID NO: 6183 - protein, 11 aa, Artificial Sequence
  Synthetic
HLARKLLSEVR

SEQ ID NO: 6184 - protein, 11 aa, Artificial Sequence
  Synthetic
MSYLKRLCGTF

SEQ ID NO: 6185 - protein, 11 aa, Artificial Sequence
  Synthetic
KWVQKYISDLK

SEQ ID NO: 6186 - protein, 11 aa, Artificial Sequence
  Synthetic
RLQRLLQGLVG

SEQ ID NO: 6187 - protein, 11 aa, Artificial Sequence
  Synthetic
FNRAVKSLQNA

SEQ ID NO: 6188 - protein, 11 aa, Artificial Sequence
  Synthetic
VKTCWKTMSSF

SEQ ID NO: 6189 - protein, 11 aa, Artificial Sequence
  Synthetic
VKTCWKTMSSF

SEQ ID NO: 6190 - protein, 11 aa, Artificial Sequence
  Synthetic
VKTCWKTMSSF

SEQ ID NO: 6191 - protein, 11 aa, Artificial Sequence
  Synthetic
VKTCWKTMSSF

SEQ ID NO: 6192 - protein, 12 aa, Artificial Sequence
  Synthetic
LMHNLGKHLNSM

SEQ ID NO: 6193 - protein, 12 aa, Artificial Sequence
  Synthetic
LHHILSQFRACI

SEQ ID NO: 6194 - protein, 11 aa, Artificial Sequence
  Synthetic
VKALKALLGAL

SEQ ID NO: 6195 - protein, 12 aa, Artificial Sequence
  Synthetic
KAVEQIKNAFNK

SEQ ID NO: 6196 - protein, 12 aa, Artificial Sequence
  Synthetic
KAVEQIKNAFNK

SEQ ID NO: 6197 - protein, 12 aa, Artificial Sequence
  Synthetic
KAVEQIKNAFNK

SEQ ID NO: 6198 - protein, 11 aa, Artificial Sequence
  Synthetic
GVVNAISRACR

SEQ ID NO: 6199 - protein, 11 aa, Artificial Sequence
  Synthetic
GVVNAISRACR

SEQ ID NO: 6200 - protein, 11 aa, Artificial Sequence
  Synthetic
GVVNAISRACR

SEQ ID NO: 6201 - protein, 12 aa, Artificial Sequence
  Synthetic
LRDAFSRVKTFF

SEQ ID NO: 6202 - protein, 11 aa, Artificial Sequence
  Synthetic
LQKVFDRYKSY

SEQ ID NO: 6203 - protein, 11 aa, Artificial Sequence
  Synthetic
LQKVFDRYKSY

SEQ ID NO: 6204 - protein, 12 aa, Artificial Sequence
  Synthetic
CKGLGAKVHTFV

SEQ ID NO: 6205 - protein, 12 aa, Artificial Sequence
  Synthetic
RLGHNLFGIYQK

SEQ ID NO: 6206 - protein, 12 aa, Artificial Sequence
  Synthetic
GPRFGKHLLSYC

SEQ ID NO: 6207 - protein, 12 aa, Artificial Sequence
  Synthetic
LHHILSQLRACI

SEQ ID NO: 6208 - protein, 11 aa, Artificial Sequence
  Synthetic
LASGAHKLVRF

SEQ ID NO: 6209 - protein, 11 aa, Artificial Sequence
  Synthetic
LASGAHKLVRF

SEQ ID NO: 6210 - protein, 12 aa, Artificial Sequence
  Synthetic
LAQRWMERLKTV

SEQ ID NO: 6211 - protein, 12 aa, Artificial Sequence
  Synthetic
VWGHCTKMATRG

SEQ ID NO: 6212 - protein, 11 aa, Artificial Sequence
  Synthetic
WKQYKQGFGSI

SEQ ID NO: 6213 - protein, 11 aa, Artificial Sequence
  Synthetic
ASSIFKTLRTI

SEQ ID NO: 6214 - protein, 12 aa, Artificial Sequence
  Synthetic
WVAVCKQVCTRV

SEQ ID NO: 6215 - protein, 12 aa, Artificial Sequence
  Synthetic
GLLQSYLKGLGR

SEQ ID NO: 6216 - protein, 11 aa, Artificial Sequence
  Synthetic
MTKMYKGFQAL

SEQ ID NO: 6217 - protein, 12 aa, Artificial Sequence
  Synthetic
CARVFHTGGARL

SEQ ID NO: 6218 - protein, 11 aa, Artificial Sequence
  Synthetic
IKPCKSVCERA

SEQ ID NO: 6219 - protein, 11 aa, Artificial Sequence
  Synthetic
FRSFGSSYSRV

SEQ ID NO: 6220 - protein, 11 aa, Artificial Sequence
  Synthetic
LQAIRDGLRKG

SEQ ID NO: 6221 - protein, 12 aa, Artificial Sequence
  Synthetic
ATRGCRPWGSLL

SEQ ID NO: 6222 - protein, 12 aa, Artificial Sequence
  Synthetic
ATRGCRPWGSLL

SEQ ID NO: 6223 - protein, 12 aa, Artificial Sequence
  Synthetic
LGSPIEKLCKHI

SEQ ID NO: 6224 - protein, 12 aa, Artificial Sequence
  Synthetic
GPHLFGKIVNRG

SEQ ID NO: 6225 - protein, 11 aa, Artificial Sequence
  Synthetic
GVVNAMSRACR

SEQ ID NO: 6226 - protein, 11 aa, Artificial Sequence
  Synthetic
GVVNAMSRACR

SEQ ID NO: 6227 - protein, 11 aa, Artificial Sequence
  Synthetic
GVVNAMSRACR

SEQ ID NO: 6228 - protein, 12 aa, Artificial Sequence
  Synthetic
KWVQDFMKHLDK

SEQ ID NO: 6229 - protein, 12 aa, Artificial Sequence
  Synthetic
MREAGAQLKKLV

SEQ ID NO: 6230 - protein, 12 aa, Artificial Sequence
  Synthetic
QACNSAMKNINK

SEQ ID NO: 6231 - protein, 12 aa, Artificial Sequence
  Synthetic
HHYSKGFRQAAS

SEQ ID NO: 6232 - protein, 12 aa, Artificial Sequence
  Synthetic
RAIKPYQTLIKE

SEQ ID NO: 6233 - protein, 12 aa, Artificial Sequence
  Synthetic
GEVGRRGKAGLR

SEQ ID NO: 6234 - protein, 11 aa, Artificial Sequence
  Synthetic
LTQGLRQLRNA

SEQ ID NO: 6235 - protein, 11 aa, Artificial Sequence
  Synthetic
AARVARFVTHV

SEQ ID NO: 6236 - protein, 11 aa, Artificial Sequence
  Synthetic
LNQARNGGRHF

SEQ ID NO: 6237 - protein, 11 aa, Artificial Sequence
  Synthetic
WKSCTAIGGRC

SEQ ID NO: 6238 - protein, 12 aa, Artificial Sequence
  Synthetic
QIFGAVKSLWTK

SEQ ID NO: 6239 - protein, 11 aa, Artificial Sequence
  Synthetic
RAVKCGKGLAA

SEQ ID NO: 6240 - protein, 11 aa, Artificial Sequence
  Synthetic
TLIKTIVTRIN

SEQ ID NO: 6241 - protein, 11 aa, Artificial Sequence
  Synthetic
TLIKTIVTRIN

SEQ ID NO: 6242 - protein, 11 aa, Artificial Sequence
  Synthetic
TLIKTIVTRIN

SEQ ID NO: 6243 - protein, 11 aa, Artificial Sequence
  Synthetic
TLIKTIVTRIN

SEQ ID NO: 6244 - protein, 11 aa, Artificial Sequence
  Synthetic
RARAAGARGCR

SEQ ID NO: 6245 - protein, 11 aa, Artificial Sequence
  Synthetic
TAFGSGIHKIR

SEQ ID NO: 6246 - protein, 12 aa, Artificial Sequence
  Synthetic
AAGAFRGLKQLI

SEQ ID NO: 6247 - protein, 11 aa, Artificial Sequence
  Synthetic
LERLRRGLAAG

SEQ ID NO: 6248 - protein, 11 aa, Artificial Sequence
  Synthetic
AYIQSLLKRYQ

SEQ ID NO: 6249 - protein, 11 aa, Artificial Sequence
  Synthetic
IASFVKKYNTY

SEQ ID NO: 6250 - protein, 11 aa, Artificial Sequence
  Synthetic
IASFVKKYNTY

SEQ ID NO: 6251 - protein, 11 aa, Artificial Sequence
  Synthetic
LNMAKNALRNM

SEQ ID NO: 6252 - protein, 11 aa, Artificial Sequence
  Synthetic
KVGQACCRPIA

SEQ ID NO: 6253 - protein, 11 aa, Artificial Sequence
  Synthetic
FRPAARGLAQC

SEQ ID NO: 6254 - protein, 11 aa, Artificial Sequence
  Synthetic
CGRGYNQFKSV

SEQ ID NO: 6255 - protein, 12 aa, Artificial Sequence
  Synthetic
SFMQGYMKHATK

SEQ ID NO: 6256 - protein, 11 aa, Artificial Sequence
  Synthetic
VSAAFKGLKSL

SEQ ID NO: 6257 - protein, 12 aa, Artificial Sequence
  Synthetic
VKKLLEALSHLV

SEQ ID NO: 6258 - protein, 12 aa, Artificial Sequence
  Synthetic
KRLARAAEAWAT

SEQ ID NO: 6259 - protein, 12 aa, Artificial Sequence
  Synthetic
SWAAGAPRAGRR

SEQ ID NO: 6260 - protein, 12 aa, Artificial Sequence
  Synthetic
RAATVLRQFYSH

SEQ ID NO: 6261 - protein, 11 aa, Artificial Sequence
  Synthetic
QYSQALKKVFA

SEQ ID NO: 6262 - protein, 12 aa, Artificial Sequence
  Synthetic
ASWMSRLRALLG

SEQ ID NO: 6263 - protein, 11 aa, Artificial Sequence
  Synthetic
QWAHRAFAPLR

SEQ ID NO: 6264 - protein, 11 aa, Artificial Sequence
  Synthetic
GKSFIKDALKC

SEQ ID NO: 6265 - protein, 11 aa, Artificial Sequence
  Synthetic
RYHTCGGTLIR

SEQ ID NO: 6266 - protein, 12 aa, Artificial Sequence
  Synthetic
VTGVVRQWLSRG

SEQ ID NO: 6267 - protein, 12 aa, Artificial Sequence
  Synthetic
YNTYASRLYRTV

SEQ ID NO: 6268 - protein, 12 aa, Artificial Sequence
  Synthetic
FCHNILSCCKNM

SEQ ID NO: 6269 - protein, 11 aa, Artificial Sequence
  Synthetic
LRTALQHLHGV

SEQ ID NO: 6270 - protein, 11 aa, Artificial Sequence
  Synthetic
VNEILNHMKRA

SEQ ID NO: 6271 - protein, 11 aa, Artificial Sequence
  Synthetic
RMRRYADAIFT

SEQ ID NO: 6272 - protein, 12 aa, Artificial Sequence
  Synthetic
KRIIDSARSAYQ

SEQ ID NO: 6273 - protein, 11 aa, Artificial Sequence
  Synthetic
LGRWTHLCGTW

SEQ ID NO: 6274 - protein, 11 aa, Artificial Sequence
  Synthetic
RVDKLVEKILH

SEQ ID NO: 6275 - protein, 11 aa, Artificial Sequence
  Synthetic
RGMKLLGALLA

SEQ ID NO: 6276 - protein, 11 aa, Artificial Sequence
  Synthetic
GVYTKVYNYVK

SEQ ID NO: 6277 - protein, 11 aa, Artificial Sequence
  Synthetic
SWLHGLKALGH

SEQ ID NO: 6278 - protein, 11 aa, Artificial Sequence
  Synthetic
LQAAFSQYKKV

SEQ ID NO: 6279 - protein, 12 aa, Artificial Sequence
  Synthetic
KYFTLGESWLRK

SEQ ID NO: 6280 - protein, 12 aa, Artificial Sequence
  Synthetic
SFLEHLQRALRS

SEQ ID NO: 6281 - protein, 12 aa, Artificial Sequence
  Synthetic
KNIKEFLQSFVH

SEQ ID NO: 6282 - protein, 12 aa, Artificial Sequence
  Synthetic
KALNSIIDVYHK

SEQ ID NO: 6283 - protein, 12 aa, Artificial Sequence
  Synthetic
LLARGAKWGQAL

SEQ ID NO: 6284 - protein, 12 aa, Artificial Sequence
  Synthetic
GRGFITKAINSC

SEQ ID NO: 6285 - protein, 12 aa, Artificial Sequence
  Synthetic
GRGFITKAINSC

SEQ ID NO: 6286 - protein, 12 aa, Artificial Sequence
  Synthetic
GRGFITKAINSC

SEQ ID NO: 6287 - protein, 12 aa, Artificial Sequence
  Synthetic
GRAVYQSMCKPI

SEQ ID NO: 6288 - protein, 11 aa, Artificial Sequence
  Synthetic
KVISGILTQGR

SEQ ID NO: 6289 - protein, 11 aa, Artificial Sequence
  Synthetic
HLLRTLLELAR

SEQ ID NO: 6290 - protein, 12 aa, Artificial Sequence
  Synthetic
MAQFIHLFSKFY

SEQ ID NO: 6291 - protein, 11 aa, Artificial Sequence
  Synthetic
GYNAAYNRYFR

SEQ ID NO: 6292 - protein, 12 aa, Artificial Sequence
  Synthetic
RKLGSILNEFGH

SEQ ID NO: 6293 - protein, 12 aa, Artificial Sequence
  Synthetic
LGGRVCAAVTRC

SEQ ID NO: 6294 - protein, 12 aa, Artificial Sequence
  Synthetic
GMWHRAEHALQR

SEQ ID NO: 6295 - protein, 11 aa, Artificial Sequence
  Synthetic
LHHWLHRLQEA

SEQ ID NO: 6296 - protein, 12 aa, Artificial Sequence
  Synthetic
ALELARRGARVV

SEQ ID NO: 6297 - protein, 11 aa, Artificial Sequence
  Synthetic
RAAHAILGGLH

SEQ ID NO: 6298 - protein, 12 aa, Artificial Sequence
  Synthetic
ARAAWGRAGQPW

SEQ ID NO: 6299 - protein, 11 aa, Artificial Sequence
  Synthetic
DAVACAKRVVR

SEQ ID NO: 6300 - protein, 12 aa, Artificial Sequence
  Synthetic
RLASAGCSGWTR

SEQ ID NO: 6301 - protein, 11 aa, Artificial Sequence
  Synthetic
RAANALCAGMR

SEQ ID NO: 6302 - protein, 11 aa, Artificial Sequence
  Synthetic
LQLGRTMCGKF

SEQ ID NO: 6303 - protein, 11 aa, Artificial Sequence
  Synthetic
FSLGKQVGNKF

SEQ ID NO: 6304 - protein, 12 aa, Artificial Sequence
  Synthetic
GRRALSAVPAVL

SEQ ID NO: 6305 - protein, 12 aa, Artificial Sequence
  Synthetic
SVFGRVMQIGSR

SEQ ID NO: 6306 - protein, 11 aa, Artificial Sequence
  Synthetic
KVAKQVFQVAA

SEQ ID NO: 6307 - protein, 11 aa, Artificial Sequence
  Synthetic
LDTALRRARSA

SEQ ID NO: 6308 - protein, 11 aa, Artificial Sequence
  Synthetic
AIIKNAYKKGE

SEQ ID NO: 6309 - protein, 12 aa, Artificial Sequence
  Synthetic
LHAVVKNCFAVV

SEQ ID NO: 6310 - protein, 11 aa, Artificial Sequence
  Synthetic
FRRAYEAARAA

SEQ ID NO: 6311 - protein, 11 aa, Artificial Sequence
  Synthetic
KAGSRGLTSLA

SEQ ID NO: 6312 - protein, 11 aa, Artificial Sequence
  Synthetic
AACRRAYAAFS

SEQ ID NO: 6313 - protein, 11 aa, Artificial Sequence
  Synthetic
QVGQKAANALK

SEQ ID NO: 6314 - protein, 11 aa, Artificial Sequence
  Synthetic
VQKLAHQIYQF

SEQ ID NO: 6315 - protein, 11 aa, Artificial Sequence
  Synthetic
CDQCRHVVSKY

SEQ ID NO: 6316 - protein, 11 aa, Artificial Sequence
  Synthetic
CDQCRHVVSKY

SEQ ID NO: 6317 - protein, 11 aa, Artificial Sequence
  Synthetic
KVVGCARTVGN

SEQ ID NO: 6318 - protein, 11 aa, Artificial Sequence
  Synthetic
VRVLHSIGHSA

SEQ ID NO: 6319 - protein, 12 aa, Artificial Sequence
  Synthetic
GKYGKTGSAGAR

SEQ ID NO: 6320 - protein, 11 aa, Artificial Sequence
  Synthetic
RVVHAAKAALA

SEQ ID NO: 6321 - protein, 11 aa, Artificial Sequence
  Synthetic
LGVAGNIVRHI

SEQ ID NO: 6322 - protein, 11 aa, Artificial Sequence
  Synthetic
SLVSGIGRHVQ

SEQ ID NO: 6323 - protein, 12 aa, Artificial Sequence
  Synthetic
RRGVSQAPTAAR

SEQ ID NO: 6324 - protein, 12 aa, Artificial Sequence
  Synthetic
RGFPSGMGAAGR

SEQ ID NO: 6325 - protein, 12 aa, Artificial Sequence
  Synthetic
RKAIHELIQVMA

SEQ ID NO: 6326 - protein, 12 aa, Artificial Sequence
  Synthetic
RKAIHELIQVMA

SEQ ID NO: 6327 - protein, 12 aa, Artificial Sequence
  Synthetic
RKAIHELIQVMA

SEQ ID NO: 6328 - protein, 12 aa, Artificial Sequence
  Synthetic
RKAIHELIQVMA

SEQ ID NO: 6329 - protein, 12 aa, Artificial Sequence
  Synthetic
RKAIHELIQVMA

SEQ ID NO: 6330 - protein, 12 aa, Artificial Sequence
  Synthetic
RKAIHELIQVMA

SEQ ID NO: 6331 - protein, 12 aa, Artificial Sequence
  Synthetic
RKAIHELIQVMA

SEQ ID NO: 6332 - protein, 12 aa, Artificial Sequence
  Synthetic
RKAIHELIQVMA

SEQ ID NO: 6333 - protein, 12 aa, Artificial Sequence
  Synthetic
RKAIHELIQVMA

SEQ ID NO: 6334 - protein, 12 aa, Artificial Sequence
  Synthetic
RKAIHELIQVMA

SEQ ID NO: 6335 - protein, 12 aa, Artificial Sequence
  Synthetic
LRHLYTSGPHGL

SEQ ID NO: 6336 - protein, 12 aa, Artificial Sequence
  Synthetic
KAALSMCKSVVA

SEQ ID NO: 6337 - protein, 11 aa, Artificial Sequence
  Synthetic
HALAKACSAGR

SEQ ID NO: 6338 - protein, 11 aa, Artificial Sequence
  Synthetic
HALAKACSAGR

SEQ ID NO: 6339 - protein, 12 aa, Artificial Sequence
  Synthetic
SGVQKYTRALHD

SEQ ID NO: 6340 - protein, 11 aa, Artificial Sequence
  Synthetic
GKWYHTCGGSL

SEQ ID NO: 6341 - protein, 11 aa, Artificial Sequence
  Synthetic
VELLRRIYDRL

SEQ ID NO: 6342 - protein, 11 aa, Artificial Sequence
  Synthetic
VELLKRIYDRL

SEQ ID NO: 6343 - protein, 11 aa, Artificial Sequence
  Synthetic
VELLKRIYDKL

SEQ ID NO: 6344 - protein, 11 aa, Artificial Sequence
  Synthetic
VELLKRIYDKL

SEQ ID NO: 6345 - protein, 11 aa, Artificial Sequence
  Synthetic
VELLKRIYDKL

SEQ ID NO: 6346 - protein, 11 aa, Artificial Sequence
  Synthetic
VELLKRIYDKL

SEQ ID NO: 6347 - protein, 11 aa, Artificial Sequence
  Synthetic
VELLKRIYDKL

SEQ ID NO: 6348 - protein, 11 aa, Artificial Sequence
  Synthetic
DLYQLLQRLFK

SEQ ID NO: 6349 - protein, 12 aa, Artificial Sequence
  Synthetic
AACRAMWGLAAR

SEQ ID NO: 6350 - protein, 12 aa, Artificial Sequence
  Synthetic
LKEMIETLARKL

SEQ ID NO: 6351 - protein, 11 aa, Artificial Sequence
  Synthetic
KGSSGCKACVS

SEQ ID NO: 6352 - protein, 12 aa, Artificial Sequence
  Synthetic
EWIQRMMEVLRK

SEQ ID NO: 6353 - protein, 11 aa, Artificial Sequence
  Synthetic
CKGVFHAIVSG

SEQ ID NO: 6354 - protein, 12 aa, Artificial Sequence
  Synthetic
VVAKVGHLYAAW

SEQ ID NO: 6355 - protein, 12 aa, Artificial Sequence
  Synthetic
LNRWITFCQSII

SEQ ID NO: 6356 - protein, 12 aa, Artificial Sequence
  Synthetic
AAHCLKEGLKVY

SEQ ID NO: 6357 - protein, 11 aa, Artificial Sequence
  Synthetic
EIMQGFIRAFR

SEQ ID NO: 6358 - protein, 12 aa, Artificial Sequence
  Synthetic
VASRGRAVCGGV

SEQ ID NO: 6359 - protein, 11 aa, Artificial Sequence
  Synthetic
VNKYLGRWYEI

SEQ ID NO: 6360 - protein, 11 aa, Artificial Sequence
  Synthetic
GARGGARGTRY

SEQ ID NO: 6361 - protein, 11 aa, Artificial Sequence
  Synthetic
IDAFIKSIRTM

SEQ ID NO: 6362 - protein, 11 aa, Artificial Sequence
  Synthetic
LSKCAEQFCRL

SEQ ID NO: 6363 - protein, 11 aa, Artificial Sequence
  Synthetic
EALQEVLKKLK

SEQ ID NO: 6364 - protein, 11 aa, Artificial Sequence
  Synthetic
YNRLVRSLLEC

SEQ ID NO: 6365 - protein, 12 aa, Artificial Sequence
  Synthetic
LLGGVNKIAEKI

SEQ ID NO: 6366 - protein, 11 aa, Artificial Sequence
  Synthetic
YRSFSNIISTL

SEQ ID NO: 6367 - protein, 12 aa, Artificial Sequence
  Synthetic
IVTIINTLLKLV

SEQ ID NO: 6368 - protein, 12 aa, Artificial Sequence
  Synthetic
HCIHDGKTYVKG

SEQ ID NO: 6369 - protein, 12 aa, Artificial Sequence
  Synthetic
AGWGIVNHAGRR

SEQ ID NO: 6370 - protein, 12 aa, Artificial Sequence
  Synthetic
TFLKSLLEIFQK

SEQ ID NO: 6371 - protein, 12 aa, Artificial Sequence
  Synthetic
ISHAPNAVKTAF

SEQ ID NO: 6372 - protein, 11 aa, Artificial Sequence
  Synthetic
KWVQDYIKDMK

SEQ ID NO: 6373 - protein, 12 aa, Artificial Sequence
  Synthetic
WKSAVQGLLNYI

SEQ ID NO: 6374 - protein, 11 aa, Artificial Sequence
  Synthetic
VKDVTKLVANL

SEQ ID NO: 6375 - protein, 12 aa, Artificial Sequence
  Synthetic
CGSNGKTYLNHC

SEQ ID NO: 6376 - protein, 11 aa, Artificial Sequence
  Synthetic
RCLQKWFEPAQ

SEQ ID NO: 6377 - protein, 11 aa, Artificial Sequence
  Synthetic
YDTLIKDLKKA

SEQ ID NO: 6378 - protein, 11 aa, Artificial Sequence
  Synthetic
GQKACGSGGRC

SEQ ID NO: 6379 - protein, 12 aa, Artificial Sequence
  Synthetic
AKSVCRMLSDLC

SEQ ID NO: 6380 - protein, 11 aa, Artificial Sequence
  Synthetic
GGTVERLFKNL

SEQ ID NO: 6381 - protein, 12 aa, Artificial Sequence
  Synthetic
LTRWMQYLREGY

SEQ ID NO: 6382 - protein, 11 aa, Artificial Sequence
  Synthetic
AGAEVVHRYYR

SEQ ID NO: 6383 - protein, 11 aa, Artificial Sequence
  Synthetic
DVKTVLQNWLK

SEQ ID NO: 6384 - protein, 11 aa, Artificial Sequence
  Synthetic
HLFRHGVAHGQ

SEQ ID NO: 6385 - protein, 12 aa, Artificial Sequence
  Synthetic
WRSFFKEALQGV

SEQ ID NO: 6386 - protein, 11 aa, Artificial Sequence
  Synthetic
HCVALCTRGGH

SEQ ID NO: 6387 - protein, 11 aa, Artificial Sequence
  Synthetic
IHKYGASVSNG

SEQ ID NO: 6388 - protein, 12 aa, Artificial Sequence
  Synthetic
FQEAYRRFYGPV

SEQ ID NO: 6389 - protein, 12 aa, Artificial Sequence
  Synthetic
FKDALARVYGVI

SEQ ID NO: 6390 - protein, 12 aa, Artificial Sequence
  Synthetic
NMLGGGGSAGRK

SEQ ID NO: 6391 - protein, 12 aa, Artificial Sequence
  Synthetic
IVSIFNTLLKLA

SEQ ID NO: 6392 - protein, 12 aa, Artificial Sequence
  Synthetic
GGCSHGSRCLRD

SEQ ID NO: 6393 - protein, 12 aa, Artificial Sequence
  Synthetic
TWVRDVVRSMDR

SEQ ID NO: 6394 - protein, 12 aa, Artificial Sequence
  Synthetic
TWVRDVVRSMDR

SEQ ID NO: 6395 - protein, 11 aa, Artificial Sequence
  Synthetic
ALGRELASLFR

SEQ ID NO: 6396 - protein, 11 aa, Artificial Sequence
  Synthetic
YSALANKCCHV

SEQ ID NO: 6397 - protein, 11 aa, Artificial Sequence
  Synthetic
LKSMAGSGHNV

SEQ ID NO: 6398 - protein, 12 aa, Artificial Sequence
  Synthetic
IIRSFANSGNAI

SEQ ID NO: 6399 - protein, 11 aa, Artificial Sequence
  Synthetic
LKSFSTLANNF

SEQ ID NO: 6400 - protein, 12 aa, Artificial Sequence
  Synthetic
IKKAGTELVNFL

SEQ ID NO: 6401 - protein, 11 aa, Artificial Sequence
  Synthetic
FKTCWRAAPEF

SEQ ID NO: 6402 - protein, 12 aa, Artificial Sequence
  Synthetic
IVTIINTFLKLA

SEQ ID NO: 6403 - protein, 12 aa, Artificial Sequence
  Synthetic
LGGLLGKVTSVI

SEQ ID NO: 6404 - protein, 11 aa, Artificial Sequence
  Synthetic
ALLKALYGHGQ

SEQ ID NO: 6405 - protein, 12 aa, Artificial Sequence
  Synthetic
IVTIINTLLRLA

SEQ ID NO: 6406 - protein, 12 aa, Artificial Sequence
  Synthetic
IVTIFNTLLKIA

SEQ ID NO: 6407 - protein, 12 aa, Artificial Sequence
  Synthetic
IVTIINTLLKLA

SEQ ID NO: 6408 - protein, 12 aa, Artificial Sequence
  Synthetic
IVTIINTLLKLA

SEQ ID NO: 6409 - protein, 12 aa, Artificial Sequence
  Synthetic
IVTIINTLLKLA

SEQ ID NO: 6410 - protein, 12 aa, Artificial Sequence
  Synthetic
IVTIINTLLKLA

SEQ ID NO: 6411 - protein, 12 aa, Artificial Sequence
  Synthetic
IVTIINTLLKLA

SEQ ID NO: 6412 - protein, 12 aa, Artificial Sequence
  Synthetic
IVTIINTLLKLA

SEQ ID NO: 6413 - protein, 12 aa, Artificial Sequence
  Synthetic
IVTIINTLLKLA

SEQ ID NO: 6414 - protein, 11 aa, Artificial Sequence
  Synthetic
CQTVVRNIQSF

SEQ ID NO: 6415 - protein, 12 aa, Artificial Sequence
  Synthetic
FIRQYFTVFDRA

SEQ ID NO: 6416 - protein, 12 aa, Artificial Sequence
  Synthetic
FIRQYFTVFDRA

SEQ ID NO: 6417 - protein, 12 aa, Artificial Sequence
  Synthetic
FIRQYFTVFDRA

SEQ ID NO: 6418 - protein, 11 aa, Artificial Sequence
  Synthetic
RYGKVWSDYVG

SEQ ID NO: 6419 - protein, 12 aa, Artificial Sequence
  Synthetic
YIQEARNCLQKL

SEQ ID NO: 6420 - protein, 12 aa, Artificial Sequence
  Synthetic
YGQYLERLKQFV

SEQ ID NO: 6421 - protein, 11 aa, Artificial Sequence
  Synthetic
TYIRKALEDIR

SEQ ID NO: 6422 - protein, 11 aa, Artificial Sequence
  Synthetic
VTSARTALGRA

SEQ ID NO: 6423 - protein, 11 aa, Artificial Sequence
  Synthetic
ECNKIIQKALS

SEQ ID NO: 6424 - protein, 11 aa, Artificial Sequence
  Synthetic
SYLGRFYQDLK

SEQ ID NO: 6425 - protein, 12 aa, Artificial Sequence
  Synthetic
EFMQRALQDLRK

SEQ ID NO: 6426 - protein, 12 aa, Artificial Sequence
  Synthetic
LRTVPGALGAWL

SEQ ID NO: 6427 - protein, 12 aa, Artificial Sequence
  Synthetic
VSSLVKSIGNSY

SEQ ID NO: 6428 - protein, 12 aa, Artificial Sequence
  Synthetic
APRCGDKIYNPL

SEQ ID NO: 6429 - protein, 11 aa, Artificial Sequence
  Synthetic
EWLRRYLENGK

SEQ ID NO: 6430 - protein, 12 aa, Artificial Sequence
  Synthetic
WLQKWYGGASSI

SEQ ID NO: 6431 - protein, 11 aa, Artificial Sequence
  Synthetic
AGAIGRAGPRG

SEQ ID NO: 6432 - protein, 12 aa, Artificial Sequence
  Synthetic
KMYTGLCNFVER

SEQ ID NO: 6433 - protein, 11 aa, Artificial Sequence
  Synthetic
SFVSSLVRSIS

SEQ ID NO: 6434 - protein, 12 aa, Artificial Sequence
  Synthetic
CGSIIAKILAGY

SEQ ID NO: 6435 - protein, 12 aa, Artificial Sequence
  Synthetic
HQLRSLAGTYLN

SEQ ID NO: 6436 - protein, 11 aa, Artificial Sequence
  Synthetic
CNRAMSGINNY

SEQ ID NO: 6437 - protein, 12 aa, Artificial Sequence
  Synthetic
CRSLCEAVRAGC

SEQ ID NO: 6438 - protein, 11 aa, Artificial Sequence
  Synthetic
IAKVGQLFAAW

SEQ ID NO: 6439 - protein, 11 aa, Artificial Sequence
  Synthetic
ARVFAHGAATL

SEQ ID NO: 6440 - protein, 12 aa, Artificial Sequence
  Synthetic
VSRMVSTMLSGL

SEQ ID NO: 6441 - protein, 11 aa, Artificial Sequence
  Synthetic
RMYSEIIALMK

SEQ ID NO: 6442 - protein, 11 aa, Artificial Sequence
  Synthetic
QLGQALNGVYR

SEQ ID NO: 6443 - protein, 12 aa, Artificial Sequence
  Synthetic
RAVASGCQRCCD

SEQ ID NO: 6444 - protein, 12 aa, Artificial Sequence
  Synthetic
VVTIINTLLKLA

SEQ ID NO: 6445 - protein, 12 aa, Artificial Sequence
  Synthetic
KLFSDLGSSYAK

SEQ ID NO: 6446 - protein, 12 aa, Artificial Sequence
  Synthetic
IIATLKNGVQTC

SEQ ID NO: 6447 - protein, 12 aa, Artificial Sequence
  Synthetic
ISQASSCLQKLL

SEQ ID NO: 6448 - protein, 12 aa, Artificial Sequence
  Synthetic
HGAMGAFRALCG

SEQ ID NO: 6449 - protein, 11 aa, Artificial Sequence
  Synthetic
ASCGGRAGGRC

SEQ ID NO: 6450 - protein, 12 aa, Artificial Sequence
  Synthetic
YKQIIAVLAQAF

SEQ ID NO: 6451 - protein, 11 aa, Artificial Sequence
  Synthetic
FTALVTQCQKM

SEQ ID NO: 6452 - protein, 12 aa, Artificial Sequence
  Synthetic
RSWVEKIVQGVQ

SEQ ID NO: 6453 - protein, 12 aa, Artificial Sequence
  Synthetic
MAQYAADLRRYI

SEQ ID NO: 6454 - protein, 12 aa, Artificial Sequence
  Synthetic
LLQAAPRGAAHY

SEQ ID NO: 6455 - protein, 11 aa, Artificial Sequence
  Synthetic
TIFNTLLKLAG

SEQ ID NO: 6456 - protein, 12 aa, Artificial Sequence
  Synthetic
YQGMCRNACREY

SEQ ID NO: 6457 - protein, 11 aa, Artificial Sequence
  Synthetic
VARFYAAAMHV

SEQ ID NO: 6458 - protein, 12 aa, Artificial Sequence
  Synthetic
SLFSSVFSSCQR

SEQ ID NO: 6459 - protein, 12 aa, Artificial Sequence
  Synthetic
SLFSSVFSSCQR

SEQ ID NO: 6460 - protein, 12 aa, Artificial Sequence
  Synthetic
RGLMQSLPTFIQ

SEQ ID NO: 6461 - protein, 12 aa, Artificial Sequence
  Synthetic
ASTGWNSVSRII

SEQ ID NO: 6462 - protein, 12 aa, Artificial Sequence
  Synthetic
LRAGAQQGLSRA

SEQ ID NO: 6463 - protein, 12 aa, Artificial Sequence
  Synthetic
RKMAGEMAEGLR

SEQ ID NO: 6464 - protein, 12 aa, Artificial Sequence
  Synthetic
LRSGVQQLIQYY

SEQ ID NO: 6465 - protein, 11 aa, Artificial Sequence
  Synthetic
ASAILNRMQNI

SEQ ID NO: 6466 - protein, 12 aa, Artificial Sequence
  Synthetic
CGKSLPGVYTNV

SEQ ID NO: 6467 - protein, 12 aa, Artificial Sequence
  Synthetic
RICTPMGKLGDS

SEQ ID NO: 6468 - protein, 11 aa, Artificial Sequence
  Synthetic
GVYTKVCKYVD

SEQ ID NO: 6469 - protein, 12 aa, Artificial Sequence
  Synthetic
VTGIITQGARNF

SEQ ID NO: 6470 - protein, 11 aa, Artificial Sequence
  Synthetic
GVPGVYTNLCK

SEQ ID NO: 6471 - protein, 12 aa, Artificial Sequence
  Synthetic
CQSVAASCARSC

SEQ ID NO: 6472 - protein, 12 aa, Artificial Sequence
  Synthetic
ACNSAMSIINKY

SEQ ID NO: 6473 - protein, 12 aa, Artificial Sequence
  Synthetic
LSHYYASLCHYL

SEQ ID NO: 6474 - protein, 11 aa, Artificial Sequence
  Synthetic
GEAFGKKWCSL

SEQ ID NO: 6475 - protein, 11 aa, Artificial Sequence
  Synthetic
SLVRDGCGCCK

SEQ ID NO: 6476 - protein, 11 aa, Artificial Sequence
  Synthetic
GLVRDGCGCCK

SEQ ID NO: 6477 - protein, 11 aa, Artificial Sequence
  Synthetic
GYPGVYTNLCK

SEQ ID NO: 6478 - protein, 11 aa, Artificial Sequence
  Synthetic
GKNISTYLTQV

SEQ ID NO: 6479 - protein, 12 aa, Artificial Sequence
  Synthetic
ILKRGPGVGEGL

SEQ ID NO: 6480 - protein, 12 aa, Artificial Sequence
  Synthetic
SLISPLAQAVRS

SEQ ID NO: 6481 - protein, 11 aa, Artificial Sequence
  Synthetic
RVVSGAANVIG

SEQ ID NO: 6482 - protein, 11 aa, Artificial Sequence
  Synthetic
MREYMHHLLAL

SEQ ID NO: 6483 - protein, 12 aa, Artificial Sequence
  Synthetic
SGGNFLTGLGHR

SEQ ID NO: 6484 - protein, 12 aa, Artificial Sequence
  Synthetic
KQLYNKYPDAVA

SEQ ID NO: 6485 - protein, 11 aa, Artificial Sequence
  Synthetic
KGFQCCSSFCG

SEQ ID NO: 6486 - protein, 12 aa, Artificial Sequence
  Synthetic
NIASKLPDAAAK

SEQ ID NO: 6487 - protein, 11 aa, Artificial Sequence
  Synthetic
LTHCASAFPHL

SEQ ID NO: 6488 - protein, 11 aa, Artificial Sequence
  Synthetic
QAANEWGRSGK

SEQ ID NO: 6489 - protein, 12 aa, Artificial Sequence
  Synthetic
NCWATGWGLVSK

SEQ ID NO: 6490 - protein, 11 aa, Artificial Sequence
  Synthetic
GLLSGWARNGT

SEQ ID NO: 6491 - protein, 12 aa, Artificial Sequence
  Synthetic
LLAWCAGACRGA

SEQ ID NO: 6492 - protein, 12 aa, Artificial Sequence
  Synthetic
VYTHGCGCVRSA

SEQ ID NO: 6493 - protein, 11 aa, Artificial Sequence
  Synthetic
GQQMFQGVKSI

SEQ ID NO: 6494 - protein, 12 aa, Artificial Sequence
  Synthetic
RNCRELLSQGAT

SEQ ID NO: 6495 - protein, 11 aa, Artificial Sequence
  Synthetic
VGRAAGLLSGL

SEQ ID NO: 6496 - protein, 11 aa, Artificial Sequence
  Synthetic
GTILGRWCGSG

SEQ ID NO: 6497 - protein, 12 aa, Artificial Sequence
  Synthetic
AAALGKALCALL

SEQ ID NO: 6498 - protein, 11 aa, Artificial Sequence
  Synthetic
VALISKLGTAV

SEQ ID NO: 6499 - protein, 12 aa, Artificial Sequence
  Synthetic
AKAAMTELKSCI

SEQ ID NO: 6500 - protein, 12 aa, Artificial Sequence
  Synthetic
RYCAGACEAAAR

SEQ ID NO: 6501 - protein, 11 aa, Artificial Sequence
  Synthetic
QGCSIYKDYYR

SEQ ID NO: 6502 - protein, 12 aa, Artificial Sequence
  Synthetic
ASALGSWKAFLG

SEQ ID NO: 6503 - protein, 11 aa, Artificial Sequence
  Synthetic
AANAQKWANQC

SEQ ID NO: 6504 - protein, 12 aa, Artificial Sequence
  Synthetic
VAKQCSAGCAAM

SEQ ID NO: 6505 - protein, 11 aa, Artificial Sequence
  Synthetic
TYYSIIGGGLR

SEQ ID NO: 6506 - protein, 11 aa, Artificial Sequence
  Synthetic
ACRRCMGDAGA

SEQ ID NO: 6507 - protein, 11 aa, Artificial Sequence
  Synthetic
GSTGTQLCKAL

SEQ ID NO: 6508 - protein, 11 aa, Artificial Sequence
  Synthetic
QVAKAGGTWLG

SEQ ID NO: 6509 - protein, 11 aa, Artificial Sequence
  Synthetic
NGLAFISSGLK

SEQ ID NO: 6510 - protein, 11 aa, Artificial Sequence
  Synthetic
GEKAITQVSKG

SEQ ID NO: 6511 - protein, 12 aa, Artificial Sequence
  Synthetic
GALSTMVQLYSR

SEQ ID NO: 6512 - protein, 11 aa, Artificial Sequence
  Synthetic
GARGCNGIPGA

SEQ ID NO: 6513 - protein, 11 aa, Artificial Sequence
  Synthetic
VAKFYAAAMNA

SEQ ID NO: 6514 - protein, 11 aa, Artificial Sequence
  Synthetic
QAIRAAQGLLA

SEQ ID NO: 6515 - protein, 12 aa, Artificial Sequence
  Synthetic
GSFVAPVRGVYS

SEQ ID NO: 6516 - protein, 11 aa, Artificial Sequence
  Synthetic
KAYNSCISQGS

SEQ ID NO: 6517 - protein, 12 aa, Artificial Sequence
  Synthetic
REGAERGLSAIR

SEQ ID NO: 6518 - protein, 11 aa, Artificial Sequence
  Synthetic
QLLAGGLHAGK

SEQ ID NO: 6519 - protein, 11 aa, Artificial Sequence
  Synthetic
ALLRAAGSLAA

SEQ ID NO: 6520 - protein, 11 aa, Artificial Sequence
  Synthetic
KMASGAANVVG

SEQ ID NO: 6521 - protein, 11 aa, Artificial Sequence
  Synthetic
GVAQGIVSYGR

SEQ ID NO: 6522 - protein, 12 aa, Artificial Sequence
  Synthetic
ALARCPGCGQGV

SEQ ID NO: 6523 - protein, 12 aa, Artificial Sequence
  Synthetic
TAYRTALSHGHQ

SEQ ID NO: 6524 - protein, 11 aa, Artificial Sequence
  Synthetic
SGLAFISSGLK

SEQ ID NO: 6525 - protein, 11 aa, Artificial Sequence
  Synthetic
AYPGVGSALGR

SEQ ID NO: 6526 - protein, 12 aa, Artificial Sequence
  Synthetic
LPAGGGTVLTKM

SEQ ID NO: 6527 - protein, 11 aa, Artificial Sequence
  Synthetic
LERAASRANTV

SEQ ID NO: 6528 - protein, 11 aa, Artificial Sequence
  Synthetic
QAGDTIFNRAK

SEQ ID NO: 6529 - protein, 11 aa, Artificial Sequence
  Synthetic
VARFYAAAMSG

SEQ ID NO: 6530 - protein, 11 aa, Artificial Sequence
  Synthetic
SFAGNGLSALR

SEQ ID NO: 6531 - protein, 11 aa, Artificial Sequence
  Synthetic
MKHLDQIFQNL

SEQ ID NO: 6532 - protein, 12 aa, Artificial Sequence
  Synthetic
AARGTNVGRECC

SEQ ID NO: 6533 - protein, 12 aa, Artificial Sequence
  Synthetic
GIQGGSRCLACV

SEQ ID NO: 6534 - protein, 12 aa, Artificial Sequence
  Synthetic
LTAGVSAGRQMI

SEQ ID NO: 6535 - protein, 11 aa, Artificial Sequence
  Synthetic
AGRGETCYRTV

SEQ ID NO: 6536 - protein, 12 aa, Artificial Sequence
  Synthetic
MAAASAGATRLL

SEQ ID NO: 6537 - protein, 12 aa, Artificial Sequence
  Synthetic
CAAAAGRAGGSC

SEQ ID NO: 6538 - protein, 12 aa, Artificial Sequence
  Synthetic
GAGGGGCRGVDR

SEQ ID NO: 6539 - protein, 11 aa, Artificial Sequence
  Synthetic
AEGAFRRGPGL

SEQ ID NO: 6540 - protein, 11 aa, Artificial Sequence
  Synthetic
DYRGGGRTVIQ

SEQ ID NO: 6541 - protein, 12 aa, Artificial Sequence
  Synthetic
GSHVAQACVGHC

SEQ ID NO: 6542 - protein, 11 aa, Artificial Sequence
  Synthetic
AERGARNALGG

SEQ ID NO: 6543 - protein, 12 aa, Artificial Sequence
  Synthetic
VQKAAQAAVASY

SEQ ID NO: 6544 - protein, 11 aa, Artificial Sequence
  Synthetic
HAVSNACALGK

SEQ ID NO: 6545 - protein, 12 aa, Artificial Sequence
  Synthetic
IRDLYHYITSYV

SEQ ID NO: 6546 - protein, 12 aa, Artificial Sequence
  Synthetic
IRDLYHYITSYV

SEQ ID NO: 6547 - protein, 11 aa, Artificial Sequence
  Synthetic
ELHRALERLAA

SEQ ID NO: 6548 - protein, 11 aa, Artificial Sequence
  Synthetic
RFFSAAAAPAA

SEQ ID NO: 6549 - protein, 12 aa, Artificial Sequence
  Synthetic
GYLNRIHELLNG

SEQ ID NO: 6550 - protein, 11 aa, Artificial Sequence
  Synthetic
KGQGACQTYCT

SEQ ID NO: 6551 - protein, 11 aa, Artificial Sequence
  Synthetic
YSNFISHLANI

SEQ ID NO: 6552 - protein, 11 aa, Artificial Sequence
  Synthetic
YHTGLHTGHSF

SEQ ID NO: 6553 - protein, 12 aa, Artificial Sequence
  Synthetic
HEMLQQIFSLFR

SEQ ID NO: 6554 - protein, 11 aa, Artificial Sequence
  Synthetic
AHCIGGFWREV

SEQ ID NO: 6555 - protein, 11 aa, Artificial Sequence
  Synthetic
MRQYGECLHSC

SEQ ID NO: 6556 - protein, 11 aa, Artificial Sequence
  Synthetic
VTSGKEFYGRG

SEQ ID NO: 6557 - protein, 12 aa, Artificial Sequence
  Synthetic
RCGDKFYDPLQH

SEQ ID NO: 6558 - protein, 11 aa, Artificial Sequence
  Synthetic
TWAGKMYGPGG

SEQ ID NO: 6559 - protein, 12 aa, Artificial Sequence
  Synthetic
LAGCLSQLHSGL

SEQ ID NO: 6560 - protein, 11 aa, Artificial Sequence
  Synthetic
KLKDAFSHVVE

SEQ ID NO: 6561 - protein, 12 aa, Artificial Sequence
  Synthetic
LRHYCEPYTTWC

SEQ ID NO: 6562 - protein, 11 aa, Artificial Sequence
  Synthetic
HAVATACSLGK

SEQ ID NO: 6563 - protein, 12 aa, Artificial Sequence
  Synthetic
IIHVVATLLSTL

SEQ ID NO: 6564 - protein, 12 aa, Artificial Sequence
  Synthetic
LKECGHAYSGIV

SEQ ID NO: 6565 - protein, 11 aa, Artificial Sequence
  Synthetic
NAYSGILGIWH

SEQ ID NO: 6566 - protein, 12 aa, Artificial Sequence
  Synthetic
HLATSALSLLTH

SEQ ID NO: 6567 - protein, 11 aa, Artificial Sequence
  Synthetic
KVYEGAHRAVE

SEQ ID NO: 6568 - protein, 11 aa, Artificial Sequence
  Synthetic
ANGYVEHLFRY

SEQ ID NO: 6569 - protein, 11 aa, Artificial Sequence
  Synthetic
HMLTHLAEALH

SEQ ID NO: 6570 - protein, 11 aa, Artificial Sequence
  Synthetic
LHHLIAEIHTA

SEQ ID NO: 6571 - protein, 12 aa, Artificial Sequence
  Synthetic
LTSGVHTFPAVL

SEQ ID NO: 6572 - protein, 11 aa, Artificial Sequence
  Synthetic
GYCRTCCHWGE

SEQ ID NO: 6573 - protein, 11 aa, Artificial Sequence
  Synthetic
GHKVCTSCCEG

SEQ ID NO: 6574 - protein, 11 aa, Artificial Sequence
  Synthetic
GVYTKVCHYLE

SEQ ID NO: 6575 - protein, 11 aa, Artificial Sequence
  Synthetic
GQWYHTCGGSL

SEQ ID NO: 6576 - protein, 11 aa, Artificial Sequence
  Synthetic
GQAACGRAASG

SEQ ID NO: 6577 - protein, 11 aa, Artificial Sequence
  Synthetic
GALARAGAAGA

SEQ ID NO: 6578 - protein, 12 aa, Artificial Sequence
  Synthetic
HGLLASATNWIS

SEQ ID NO: 6579 - protein, 11 aa, Artificial Sequence
  Synthetic
AGLRLVGEAFH

SEQ ID NO: 6580 - protein, 12 aa, Artificial Sequence
  Synthetic
AFMASLATHFSN

SEQ ID NO: 6581 - protein, 11 aa, Artificial Sequence
  Synthetic
AAASSVAKGGA

SEQ ID NO: 6582 - protein, 12 aa, Artificial Sequence
  Synthetic
EGAKTGIKECQH

SEQ ID NO: 6583 - protein, 12 aa, Artificial Sequence
  Synthetic
ICAVGHGVAALC

SEQ ID NO: 6584 - protein, 11 aa, Artificial Sequence
  Synthetic
VTHVFGSGTQL

SEQ ID NO: 6585 - protein, 12 aa, Artificial Sequence
  Synthetic
AAGVAHAITAAC

SEQ ID NO: 6586 - protein, 12 aa, Artificial Sequence
  Synthetic
VFQTGKTGATTG

SEQ ID NO: 6587 - protein, 12 aa, Artificial Sequence
  Synthetic
GGGGPGTGWGTR

SEQ ID NO: 6588 - protein, 11 aa, Artificial Sequence
  Synthetic
ASALWAAAWHG

SEQ ID NO: 6589 - protein, 11 aa, Artificial Sequence
  Synthetic
AMGDRGMQLMH

SEQ ID NO: 6590 - protein, 11 aa, Artificial Sequence
  Synthetic
GVAHAVTAACS

SEQ ID NO: 6591 - protein, 11 aa, Artificial Sequence
  Synthetic
GVAHAVTAACS

SEQ ID NO: 6592 - protein, 11 aa, Artificial Sequence
  Synthetic
VHAIASAGVAF

SEQ ID NO: 6593 - protein, 11 aa, Artificial Sequence
  Synthetic
VHAIASAGVAF

SEQ ID NO: 6594 - protein, 12 aa, Artificial Sequence
  Synthetic
LWAALGAAAHIG

SEQ ID NO: 6595 - protein, 11 aa, Artificial Sequence
  Synthetic
AGRGGAAAPTA

SEQ ID NO: 6596 - protein, 12 aa, Artificial Sequence
  Synthetic
THAGGTGPEGCR

SEQ ID NO: 6597 - protein, 12 aa, Artificial Sequence
  Synthetic
GTAAAPAQGGAH

SEQ ID NO: 6598 - protein, 12 aa, Artificial Sequence
  Synthetic
GTAAAPAQGGAH

SEQ ID NO: 6599 - protein, 12 aa, Artificial Sequence
  Synthetic
GTAAAPAQGGAH

SEQ ID NO: 6600 - protein, 11 aa, Artificial Sequence
  Synthetic
LTNAIKDALAA

SEQ ID NO: 6601 - protein, 12 aa, Artificial Sequence
  Synthetic
FFESVYGQCKAI

SEQ ID NO: 6602 - protein, 11 aa, Artificial Sequence
  Synthetic
LTGLLGTLVTM

SEQ ID NO: 6603 - protein, 12 aa, Artificial Sequence
  Synthetic
MKNLLNRIIDDM

SEQ ID NO: 6604 - protein, 11 aa, Artificial Sequence
  Synthetic
LAQVGAKGDTA

SEQ ID NO: 6605 - protein, 12 aa, Artificial Sequence
  Synthetic
LLGGWMALGQGG

SEQ ID NO: 6606 - protein, 12 aa, Artificial Sequence
  Synthetic
SRLLSVGGEAFS

SEQ ID NO: 6607 - protein, 11 aa, Artificial Sequence
  Synthetic
AGAIIGTLLAL

SEQ ID NO: 6608 - protein, 12 aa, Artificial Sequence
  Synthetic
VFAVFSAAASNW

SEQ ID NO: 6609 - protein, 12 aa, Artificial Sequence
  Synthetic
VFAVFSAAASNW

SEQ ID NO: 6610 - protein, 12 aa, Artificial Sequence
  Synthetic
FGGTVYRSGESF

SEQ ID NO: 6611 - protein, 12 aa, Artificial Sequence
  Synthetic
NQWYTVCQTGWS

SEQ ID NO: 6612 - protein, 12 aa, Artificial Sequence
  Synthetic
TLASSYASWIQS

SEQ ID NO: 6613 - protein, 11 aa, Artificial Sequence
  Synthetic
ARFAAGVAEQF

SEQ ID NO: 6614 - protein, 12 aa, Artificial Sequence
  Synthetic
CQKICEPLGGYY

SEQ ID NO: 6615 - protein, 11 aa, Artificial Sequence
  Synthetic
FGAILGAILGV

SEQ ID NO: 6616 - protein, 12 aa, Artificial Sequence
  Synthetic
LISRISSVGGEA

SEQ ID NO: 6617 - protein, 11 aa, Artificial Sequence
  Synthetic
GTTGSGAGSGG

SEQ ID NO: 6618 - protein, 12 aa, Artificial Sequence
  Synthetic
RYIDFCESGLSR

SEQ ID NO: 6619 - protein, 12 aa, Artificial Sequence
  Synthetic
AFAGYSGLLAGV

SEQ ID NO: 6620 - protein, 12 aa, Artificial Sequence
  Synthetic
LVTTALTMGREI

SEQ ID NO: 6621 - protein, 11 aa, Artificial Sequence
  Synthetic
AHFYGHCGEQL

SEQ ID NO: 6622 - protein, 11 aa, Artificial Sequence
  Synthetic
IQSFEQVGTKV

SEQ ID NO: 6623 - protein, 11 aa, Artificial Sequence
  Synthetic
ELNQAVRTGGG

SEQ ID NO: 6624 - protein, 12 aa, Artificial Sequence
  Synthetic
AGVISWGEGCAR

SEQ ID NO: 6625 - protein, 12 aa, Artificial Sequence
  Synthetic
IRGFIDKIAENV

SEQ ID NO: 6626 - protein, 12 aa, Artificial Sequence
  Synthetic
KAGQLISELFTN

SEQ ID NO: 6627 - protein, 11 aa, Artificial Sequence
  Synthetic
SCYSAGIAKLE

SEQ ID NO: 6628 - protein, 11 aa, Artificial Sequence
  Synthetic
AGSWGAQIIGG

SEQ ID NO: 6629 - protein, 12 aa, Artificial Sequence
  Synthetic
TFLEDLKSFVKS

SEQ ID NO: 6630 - protein, 12 aa, Artificial Sequence
  Synthetic
SLCQPGQKLVSD

SEQ ID NO: 6631 - protein, 11 aa, Artificial Sequence
  Synthetic
AAELRNFLRDL

SEQ ID NO: 6632 - protein, 11 aa, Artificial Sequence
  Synthetic
NVSQGCQGGCA

SEQ ID NO: 6633 - protein, 12 aa, Artificial Sequence
  Synthetic
LLAAYAGPAQSL

SEQ ID NO: 6634 - protein, 12 aa, Artificial Sequence
  Synthetic
LISRISSVGGEA

SEQ ID NO: 6635 - protein, 11 aa, Artificial Sequence
  Synthetic
AASLGSQGSGL

SEQ ID NO: 6636 - protein, 12 aa, Artificial Sequence
  Synthetic
ALTQVEAAITRG

SEQ ID NO: 6637 - protein, 11 aa, Artificial Sequence
  Synthetic
GSQACAKGCEL

SEQ ID NO: 6638 - protein, 11 aa, Artificial Sequence
  Synthetic
AGASGVSSCMG

SEQ ID NO: 6639 - protein, 11 aa, Artificial Sequence
  Synthetic
AGASGVSSCMG

SEQ ID NO: 6640 - protein, 12 aa, Artificial Sequence
  Synthetic
LCEGVFRGVTSF

SEQ ID NO: 6641 - protein, 12 aa, Artificial Sequence
  Synthetic
EKLIQNIKEMVT

SEQ ID NO: 6642 - protein, 12 aa, Artificial Sequence
  Synthetic
HKGWDFVEGYFH

SEQ ID NO: 6643 - protein, 12 aa, Artificial Sequence
  Synthetic
ELYRVVESLAKA

SEQ ID NO: 6644 - protein, 11 aa, Artificial Sequence
  Synthetic
GAGGSGAISTA

SEQ ID NO: 6645 - protein, 12 aa, Artificial Sequence
  Synthetic
GWGDFYSNIKTV

SEQ ID NO: 6646 - protein, 12 aa, Artificial Sequence
  Synthetic
KSVCEVGSNWFQ

SEQ ID NO: 6647 - protein, 12 aa, Artificial Sequence
  Synthetic
WLSWGAALGAVA

SEQ ID NO: 6648 - protein, 12 aa, Artificial Sequence
  Synthetic
CARRLGEPCDQL

SEQ ID NO: 6649 - protein, 12 aa, Artificial Sequence
  Synthetic
GVVSGGAEPCSR

SEQ ID NO: 6650 - protein, 11 aa, Artificial Sequence
  Synthetic
CGGVLQGLVSW

SEQ ID NO: 6651 - protein, 12 aa, Artificial Sequence
  Synthetic
LISGWGNTLSSG

SEQ ID NO: 6652 - protein, 12 aa, Artificial Sequence
  Synthetic
SLISGWGNTLSS

SEQ ID NO: 6653 - protein, 12 aa, Artificial Sequence
  Synthetic
KALLDNCFRVME

SEQ ID NO: 6654 - protein, 11 aa, Artificial Sequence
  Synthetic
CNGMLQGILSF

SEQ ID NO: 6655 - protein, 12 aa, Artificial Sequence
  Synthetic
WIRDMYAKVTEI

SEQ ID NO: 6656 - protein, 12 aa, Artificial Sequence
  Synthetic
CQNGGTCVAQAM

SEQ ID NO: 6657 - protein, 12 aa, Artificial Sequence
  Synthetic
VFASLCAWYSGY

SEQ ID NO: 6658 - protein, 11 aa, Artificial Sequence
  Synthetic
YSRAFGEGASA

SEQ ID NO: 6659 - protein, 12 aa, Artificial Sequence
  Synthetic
AAAFGPGQTLLS

SEQ ID NO: 6660 - protein, 12 aa, Artificial Sequence
  Synthetic
LLASCVAAGQAV

SEQ ID NO: 6661 - protein, 12 aa, Artificial Sequence
  Synthetic
LLASCVAAGQAV

SEQ ID NO: 6662 - protein, 12 aa, Artificial Sequence
  Synthetic
LLASCVAAGQAV

SEQ ID NO: 6663 - protein, 12 aa, Artificial Sequence
  Synthetic
LLATLLRPADAC

SEQ ID NO: 6664 - protein, 12 aa, Artificial Sequence
  Synthetic
GAALVSSACGGC

SEQ ID NO: 6665 - protein, 12 aa, Artificial Sequence
  Synthetic
GIQTLMRRLEDG

SEQ ID NO: 6666 - protein, 11 aa, Artificial Sequence
  Synthetic
MDKVETFLRTV

SEQ ID NO: 6667 - protein, 12 aa, Artificial Sequence
  Synthetic
CLAYFTSGFNAA

SEQ ID NO: 6668 - protein, 11 aa, Artificial Sequence
  Synthetic
AERLGNTCERA

SEQ ID NO: 6669 - protein, 12 aa, Artificial Sequence
  Synthetic
RDLLDTASALYR

SEQ ID NO: 6670 - protein, 12 aa, Artificial Sequence
  Synthetic
AGGAGVNPATQG

SEQ ID NO: 6671 - protein, 12 aa, Artificial Sequence
  Synthetic
AVGERAGQLWSQ

SEQ ID NO: 6672 - protein, 11 aa, Artificial Sequence
  Synthetic
KVPELYKDILS

SEQ ID NO: 6673 - protein, 11 aa, Artificial Sequence
  Synthetic
DCISRGGTLGT

SEQ ID NO: 6674 - protein, 11 aa, Artificial Sequence
  Synthetic
GRNGYTAVIEV

SEQ ID NO: 6675 - protein, 11 aa, Artificial Sequence
  Synthetic
GESGTSGWRGG

SEQ ID NO: 6676 - protein, 12 aa, Artificial Sequence
  Synthetic
LASEGLKHFHEA

SEQ ID NO: 6677 - protein, 12 aa, Artificial Sequence
  Synthetic
AHVMSVLHEMLQ

SEQ ID NO: 6678 - protein, 12 aa, Artificial Sequence
  Synthetic
SILDQILQNIGR

SEQ ID NO: 6679 - protein, 11 aa, Artificial Sequence
  Synthetic
DFCNDVLARAK

SEQ ID NO: 6680 - protein, 11 aa, Artificial Sequence
  Synthetic
KLYTELYQQLN

SEQ ID NO: 6681 - protein, 11 aa, Artificial Sequence
  Synthetic
KFYTELYQQLN

SEQ ID NO: 6682 - protein, 11 aa, Artificial Sequence
  Synthetic
KFCTELYQQLN

SEQ ID NO: 6683 - protein, 11 aa, Artificial Sequence
  Synthetic
KFYTELYQQLN

SEQ ID NO: 6684 - protein, 12 aa, Artificial Sequence
  Synthetic
RKGLSELDTLFS

SEQ ID NO: 6685 - protein, 12 aa, Artificial Sequence
  Synthetic
RKGLSELDTLFS

SEQ ID NO: 6686 - protein, 11 aa, Artificial Sequence
  Synthetic
WNGVGASLWAA

SEQ ID NO: 6687 - protein, 12 aa, Artificial Sequence
  Synthetic
REALEEFKKLVQ

SEQ ID NO: 6688 - protein, 12 aa, Artificial Sequence
  Synthetic
NIVEAMERFGSR

SEQ ID NO: 6689 - protein, 12 aa, Artificial Sequence
  Synthetic
LASQGLGPGSTV

SEQ ID NO: 6690 - protein, 12 aa, Artificial Sequence
  Synthetic
TLFSSIFTEAQK

SEQ ID NO: 6691 - protein, 12 aa, Artificial Sequence
  Synthetic
GCGVGTGAADKA

SEQ ID NO: 6692 - protein, 11 aa, Artificial Sequence
  Synthetic
LEAIVKAGITI

SEQ ID NO: 6693 - protein, 12 aa, Artificial Sequence
  Synthetic
RAISQGVAEWTA

SEQ ID NO: 6694 - protein, 12 aa, Artificial Sequence
  Synthetic
TVGGGVFALVTA

SEQ ID NO: 6695 - protein, 12 aa, Artificial Sequence
  Synthetic
SAGSTVYAPFTG

SEQ ID NO: 6696 - protein, 12 aa, Artificial Sequence
  Synthetic
ALTCLGGFASPG

SEQ ID NO: 6697 - protein, 11 aa, Artificial Sequence
  Synthetic
GKEGMGAWPTW

SEQ ID NO: 6698 - protein, 12 aa, Artificial Sequence
  Synthetic
QVMAAYQQIVGG

SEQ ID NO: 6699 - protein, 11 aa, Artificial Sequence
  Synthetic
LAALVQNYVQM

SEQ ID NO: 6700 - protein, 11 aa, Artificial Sequence
  Synthetic
LDDILQRLVKL

SEQ ID NO: 6701 - protein, 12 aa, Artificial Sequence
  Synthetic
SGAIGPVEAAIR

SEQ ID NO: 6702 - protein, 11 aa, Artificial Sequence
  Synthetic
LAALVQNYVQM

SEQ ID NO: 6703 - protein, 12 aa, Artificial Sequence
  Synthetic
GRMKELLETVVN

SEQ ID NO: 6704 - protein, 11 aa, Artificial Sequence
  Synthetic
TFMGCLKNCAD

SEQ ID NO: 6705 - protein, 12 aa, Artificial Sequence
  Synthetic
NNIMRTIIEFLS

SEQ ID NO: 6706 - protein, 12 aa, Artificial Sequence
  Synthetic
LFALLAAGVAPL

SEQ ID NO: 6707 - protein, 12 aa, Artificial Sequence
  Synthetic
EWVQRYMKNLDA

SEQ ID NO: 6708 - protein, 12 aa, Artificial Sequence
  Synthetic
LLGAWAALAGGV

SEQ ID NO: 6709 - protein, 12 aa, Artificial Sequence
  Synthetic
RAISQGVAEWTA

SEQ ID NO: 6710 - protein, 11 aa, Artificial Sequence
  Synthetic
QCCTSICSLYQ

SEQ ID NO: 6711 - protein, 11 aa, Artificial Sequence
  Synthetic
QCCTSICSLYQ

SEQ ID NO: 6712 - protein, 11 aa, Artificial Sequence
  Synthetic
TGCTCGSACGS

SEQ ID NO: 6713 - protein, 11 aa, Artificial Sequence
  Synthetic
AAGASVATELR

SEQ ID NO: 6714 - protein, 12 aa, Artificial Sequence
  Synthetic
KKGTNYLADVFE

SEQ ID NO: 6715 - protein, 12 aa, Artificial Sequence
  Synthetic
LSSYWESAKTAA

SEQ ID NO: 6716 - protein, 12 aa, Artificial Sequence
  Synthetic
LVTPVRTLATEA

SEQ ID NO: 6717 - protein, 12 aa, Artificial Sequence
  Synthetic
MAAALALVAGVL

SEQ ID NO: 6718 - protein, 11 aa, Artificial Sequence
  Synthetic
QCCTSICSLYQ

SEQ ID NO: 6719 - protein, 11 aa, Artificial Sequence
  Synthetic
LKWIQEYLEKA

SEQ ID NO: 6720 - protein, 11 aa, Artificial Sequence
  Synthetic
KWVREYINSLE

SEQ ID NO: 6721 - protein, 12 aa, Artificial Sequence
  Synthetic
VSSALDKLKEFG

SEQ ID NO: 6722 - protein, 11 aa, Artificial Sequence
  Synthetic
SGNTGADSLGR

SEQ ID NO: 6723 - protein, 11 aa, Artificial Sequence
  Synthetic
GGGGGAAGGAE

SEQ ID NO: 6724 - protein, 12 aa, Artificial Sequence
  Synthetic
QIAAHVISEASS

SEQ ID NO: 6725 - protein, 11 aa, Artificial Sequence
  Synthetic
AAPAAEGVGAA

SEQ ID NO: 6726 - protein, 11 aa, Artificial Sequence
  Synthetic
FHFAADCCTSY

SEQ ID NO: 6727 - protein, 11 aa, Artificial Sequence
  Synthetic
DFGAGVAGHLG

SEQ ID NO: 6728 - protein, 11 aa, Artificial Sequence
  Synthetic
VDQGATGASQG

SEQ ID NO: 6729 - protein, 12 aa, Artificial Sequence
  Synthetic
RNGHEYYGDYYQ

SEQ ID NO: 6730 - protein, 12 aa, Artificial Sequence
  Synthetic
AQAISVLHEMMQ

SEQ ID NO: 6731 - protein, 12 aa, Artificial Sequence
  Synthetic
AAALHNLDEAVK

SEQ ID NO: 6732 - protein, 12 aa, Artificial Sequence
  Synthetic
DGWSHFPTCYNS

SEQ ID NO: 6733 - protein, 12 aa, Artificial Sequence
  Synthetic
AQAISVLHEMIQ

SEQ ID NO: 6734 - protein, 12 aa, Artificial Sequence
  Synthetic
AQAISVLHEMIQ

SEQ ID NO: 6735 - protein, 12 aa, Artificial Sequence
  Synthetic
AQAISVLHEMIQ

SEQ ID NO: 6736 - protein, 12 aa, Artificial Sequence
  Synthetic
AQAISVLHEMIQ

SEQ ID NO: 6737 - protein, 11 aa, Artificial Sequence
  Synthetic
AAAVVSHFNDC

SEQ ID NO: 6738 - protein, 12 aa, Artificial Sequence
  Synthetic
TQAISVLHEMIQ

SEQ ID NO: 6739 - protein, 12 aa, Artificial Sequence
  Synthetic
TQAISVLHEMIQ

SEQ ID NO: 6740 - protein, 12 aa, Artificial Sequence
  Synthetic
QTVKTICDEVLH

SEQ ID NO: 6741 - protein, 12 aa, Artificial Sequence
  Synthetic
AQAISAFHEMIQ

SEQ ID NO: 6742 - protein, 12 aa, Artificial Sequence
  Synthetic
SVLTSLLEAFAH

SEQ ID NO: 6743 - protein, 12 aa, Artificial Sequence
  Synthetic
THFGEPLEKVAS

SEQ ID NO: 6744 - protein, 12 aa, Artificial Sequence
  Synthetic
LEGLGQQVGSHF

SEQ ID NO: 6745 - protein, 12 aa, Artificial Sequence
  Synthetic
RSYCHPIETLVD

SEQ ID NO: 6746 - protein, 12 aa, Artificial Sequence
  Synthetic
RTCLHYLGEFGE

SEQ ID NO: 6747 - protein, 11 aa, Artificial Sequence
  Synthetic
GGQASGWCSEG

SEQ ID NO: 6748 - protein, 12 aa, Artificial Sequence
  Synthetic
RAGLQEGDQVLA

SEQ ID NO: 6749 - protein, 12 aa, Artificial Sequence
  Synthetic
ELAADGVGAASR

SEQ ID NO: 6750 - protein, 11 aa, Artificial Sequence
  Synthetic
QCLDVVTHWIQ

SEQ ID NO: 6751 - protein, 12 aa, Artificial Sequence
  Synthetic
IEDMARTFFAHF

SEQ ID NO: 6752 - protein, 11 aa, Artificial Sequence
  Synthetic
ALAAAAQDAIG

SEQ ID NO: 6753 - protein, 12 aa, Artificial Sequence
  Synthetic
SAGQTLGSEYDR

SEQ ID NO: 6754 - protein, 11 aa, Artificial Sequence
  Synthetic
GHDLSEWLKGC

SEQ ID NO: 6755 - protein, 11 aa, Artificial Sequence
  Synthetic
IETIINTFHQY

SEQ ID NO: 6756 - protein, 12 aa, Artificial Sequence
  Synthetic
QTMATKAPECVE

SEQ ID NO: 6757 - protein, 12 aa, Artificial Sequence
  Synthetic
KTAFQEALDAAG

SEQ ID NO: 6758 - protein, 12 aa, Artificial Sequence
  Synthetic
RQAATMLEEAAS

SEQ ID NO: 6759 - protein, 11 aa, Artificial Sequence
  Synthetic
GAPGKDGYDGL

SEQ ID NO: 6760 - protein, 12 aa, Artificial Sequence
  Synthetic
AGVVSWGEGCAQ

SEQ ID NO: 6761 - protein, 12 aa, Artificial Sequence
  Synthetic
AGVVSWGEGCAQ

SEQ ID NO: 6762 - protein, 11 aa, Artificial Sequence
  Synthetic
LQSGDTLGASW

SEQ ID NO: 6763 - protein, 12 aa, Artificial Sequence
  Synthetic
GLGAGERWADLA

SEQ ID NO: 6764 - protein, 12 aa, Artificial Sequence
  Synthetic
ALSAMENLITYA

SEQ ID NO: 6765 - protein, 12 aa, Artificial Sequence
  Synthetic
AGAEVFSGLSSL

SEQ ID NO: 6766 - protein, 11 aa, Artificial Sequence
  Synthetic
GQDGAQAGVDG

SEQ ID NO: 6767 - protein, 12 aa, Artificial Sequence
  Synthetic
GTIQGGLQDGLQ

SEQ ID NO: 6768 - protein, 12 aa, Artificial Sequence
  Synthetic
GVGDYIGIYASI

SEQ ID NO: 6769 - protein, 12 aa, Artificial Sequence
  Synthetic
TAIWNGGQDIVA

SEQ ID NO: 6770 - protein, 11 aa, Artificial Sequence
  Synthetic
TMKEVLEQAGA

SEQ ID NO: 6771 - protein, 12 aa, Artificial Sequence
  Synthetic
VDTVFNTVWTLG

SEQ ID NO: 6772 - protein, 12 aa, Artificial Sequence
  Synthetic
SELKDFGTEAAR

SEQ ID NO: 6773 - protein, 11 aa, Artificial Sequence
  Synthetic
DGFKAVVGDAQ

SEQ ID NO: 6774 - protein, 12 aa, Artificial Sequence
  Synthetic
SQATDFGEALVR

SEQ ID NO: 6775 - protein, 11 aa, Artificial Sequence
  Synthetic
GSSGGDNGEEG

SEQ ID NO: 6776 - protein, 11 aa, Artificial Sequence
  Synthetic
VTDISGGCGAM

SEQ ID NO: 6777 - protein, 11 aa, Artificial Sequence
  Synthetic
QLPSGCQAGLD

SEQ ID NO: 6778 - protein, 12 aa, Artificial Sequence
  Synthetic
TCVEVASELGKS

SEQ ID NO: 6779 - protein, 12 aa, Artificial Sequence
  Synthetic
GMEGANSIFSGF

SEQ ID NO: 6780 - protein, 11 aa, Artificial Sequence
  Synthetic
LAALVQDYVQM

SEQ ID NO: 6781 - protein, 11 aa, Artificial Sequence
  Synthetic
MAEVGGVFASL

SEQ ID NO: 6782 - protein, 11 aa, Artificial Sequence
  Synthetic
EGVKEGIEKAG

SEQ ID NO: 6783 - protein, 11 aa, Artificial Sequence
  Synthetic
ASTIAEYISGY

SEQ ID NO: 6784 - protein, 12 aa, Artificial Sequence
  Synthetic
SQLLKDIDGYGG

SEQ ID NO: 6785 - protein, 11 aa, Artificial Sequence
  Synthetic
AEPAADGVGAA

SEQ ID NO: 6786 - protein, 11 aa, Artificial Sequence
  Synthetic
AEPAADGVGAA

SEQ ID NO: 6787 - protein, 11 aa, Artificial Sequence
  Synthetic
AEPAADGVGAA

SEQ ID NO: 6788 - protein, 11 aa, Artificial Sequence
  Synthetic
AEPAADGVGAA

SEQ ID NO: 6789 - protein, 11 aa, Artificial Sequence
  Synthetic
AEPAADGVGAA

SEQ ID NO: 6790 - protein, 11 aa, Artificial Sequence
  Synthetic
AEPAADGVGAA

SEQ ID NO: 6791 - protein, 11 aa, Artificial Sequence
  Synthetic
AEPAADGVGAA

SEQ ID NO: 6792 - protein, 11 aa, Artificial Sequence
  Synthetic
GDYYGDLAARL

SEQ ID NO: 6793 - protein, 11 aa, Artificial Sequence
  Synthetic
LSSAFDGVSGL

SEQ ID NO: 6794 - protein, 11 aa, Artificial Sequence
  Synthetic
GVFGGIGDPVT

SEQ ID NO: 6795 - protein, 11 aa, Artificial Sequence
  Synthetic
CQALGSEITGF

SEQ ID NO: 6796 - protein, 12 aa, Artificial Sequence
  Synthetic
GIQTLMGRLEDG

SEQ ID NO: 6797 - protein, 12 aa, Artificial Sequence
  Synthetic
GIQTLMGRLEDG

SEQ ID NO: 6798 - protein, 12 aa, Artificial Sequence
  Synthetic
GIQTLMGRLEDG

SEQ ID NO: 6799 - protein, 12 aa, Artificial Sequence
  Synthetic
GIQTLMGRLEDG

SEQ ID NO: 6800 - protein, 12 aa, Artificial Sequence
  Synthetic
GIQTLMGRLEDG

SEQ ID NO: 6801 - protein, 12 aa, Artificial Sequence
  Synthetic
GIQTLMGRLEDG

SEQ ID NO: 6802 - protein, 11 aa, Artificial Sequence
  Synthetic
SVCTVAGDGGE

SEQ ID NO: 6803 - protein, 12 aa, Artificial Sequence
  Synthetic
TSWSSAIQSWYD

SEQ ID NO: 6804 - protein, 11 aa, Artificial Sequence
  Synthetic
CGSVDGVIKEV

SEQ ID NO: 6805 - protein, 12 aa, Artificial Sequence
  Synthetic
IAAVVDVIRELG

SEQ ID NO: 6806 - protein, 11 aa, Artificial Sequence
  Synthetic
LGEMVTRLPDG

SEQ ID NO: 6807 - protein, 11 aa, Artificial Sequence
  Synthetic
EAMENFMQQLK

SEQ ID NO: 6808 - protein, 11 aa, Artificial Sequence
  Synthetic
WNSLSSVFTEM

SEQ ID NO: 6809 - protein, 11 aa, Artificial Sequence
  Synthetic
AEPAADGVGAV

SEQ ID NO: 6810 - protein, 11 aa, Artificial Sequence
  Synthetic
AEPAADGVGAV

SEQ ID NO: 6811 - protein, 11 aa, Artificial Sequence
  Synthetic
AEPAADGVGAV

SEQ ID NO: 6812 - protein, 11 aa, Artificial Sequence
  Synthetic
AEPAADGVGAV

SEQ ID NO: 6813 - protein, 11 aa, Artificial Sequence
  Synthetic
AEPAADGVGAV

SEQ ID NO: 6814 - protein, 11 aa, Artificial Sequence
  Synthetic
AEPAADGVGAV

SEQ ID NO: 6815 - protein, 11 aa, Artificial Sequence
  Synthetic
AEPAADGVGAV

SEQ ID NO: 6816 - protein, 12 aa, Artificial Sequence
  Synthetic
GEWLGAWNNCFT

SEQ ID NO: 6817 - protein, 12 aa, Artificial Sequence
  Synthetic
QDCTKVYKDLLE

SEQ ID NO: 6818 - protein, 11 aa, Artificial Sequence
  Synthetic
FQSLKEFMDAC

SEQ ID NO: 6819 - protein, 11 aa, Artificial Sequence
  Synthetic
IDGGCAEGPGG

SEQ ID NO: 6820 - protein, 11 aa, Artificial Sequence
  Synthetic
ASEIGSDLFAG

SEQ ID NO: 6821 - protein, 12 aa, Artificial Sequence
  Synthetic
YQELFDQGCHPY

SEQ ID NO: 6822 - protein, 12 aa, Artificial Sequence
  Synthetic
CGSDYITYGNEC

SEQ ID NO: 6823 - protein, 12 aa, Artificial Sequence
  Synthetic
GLDDFLRQVERL

SEQ ID NO: 6824 - protein, 11 aa, Artificial Sequence
  Synthetic
GSDMSTYANEC

SEQ ID NO: 6825 - protein, 11 aa, Artificial Sequence
  Synthetic
AEPVAEGVGAV

SEQ ID NO: 6826 - protein, 12 aa, Artificial Sequence
  Synthetic
GSEADSVFSGFL

SEQ ID NO: 6827 - protein, 12 aa, Artificial Sequence
  Synthetic
TDYSDCIHEAIK

SEQ ID NO: 6828 - protein, 11 aa, Artificial Sequence
  Synthetic
LGEVNTYAGDL

SEQ ID NO: 6829 - protein, 12 aa, Artificial Sequence
  Synthetic
HLLKDLEEGIQT

SEQ ID NO: 6830 - protein, 12 aa, Artificial Sequence
  Synthetic
HLLKDLEEGIQT

SEQ ID NO: 6831 - protein, 11 aa, Artificial Sequence
  Synthetic
EMNTILDNLAA

SEQ ID NO: 6832 - protein, 11 aa, Artificial Sequence
  Synthetic
CDQAWGSMLEV

SEQ ID NO: 6833 - protein, 11 aa, Artificial Sequence
  Synthetic
DVCADMVGTFT

SEQ ID NO: 6834 - protein, 12 aa, Artificial Sequence
  Synthetic
SEITSLITTILD

SEQ ID NO: 6835 - protein, 12 aa, Artificial Sequence
  Synthetic
SDITSLITTILD

SEQ ID NO: 6836 - protein, 12 aa, Artificial Sequence
  Synthetic
KAVIDEIFQGLD

SEQ ID NO: 6837 - protein, 11 aa, Artificial Sequence
  Synthetic
EWVQKYVSDLE

SEQ ID NO: 6838 - protein, 11 aa, Artificial Sequence
  Synthetic
EWVQKYVSDLE

SEQ ID NO: 6839 - protein, 11 aa, Artificial Sequence
  Synthetic
DCDDIYAQGYQ

SEQ ID NO: 6840 - protein, 11 aa, Artificial Sequence
  Synthetic
VEDAGRVLEGI

SEQ ID NO: 6841 - protein, 12 aa, Artificial Sequence
  Synthetic
RVMESLEGLLES

SEQ ID NO: 6842 - protein, 12 aa, Artificial Sequence
  Synthetic
IDTYQEFISSWG

SEQ ID NO: 6843 - protein, 12 aa, Artificial Sequence
  Synthetic
FEECLEKFFSTG

SEQ ID NO: 6844 - protein, 12 aa, Artificial Sequence
  Synthetic
SLAGELDEAMGS

SEQ ID NO: 6845 - protein, 12 aa, Artificial Sequence
  Synthetic
SLAGELDEAMGS

SEQ ID NO: 6846 - protein, 12 aa, Artificial Sequence
  Synthetic
CPALVSELLDFF

SEQ ID NO: 6847 - protein, 12 aa, Artificial Sequence
  Synthetic
LKDLEEGIQTLM

SEQ ID NO: 6848 - protein, 12 aa, Artificial Sequence
  Synthetic
LKDLEEGIQTLM

SEQ ID NO: 6849 - protein, 12 aa, Artificial Sequence
  Synthetic
LKDLEEGIQTLM

SEQ ID NO: 6850 - protein, 11 aa, Artificial Sequence
  Synthetic
GTEIIENAVEF

SEQ ID NO: 6851 - protein, 12 aa, Artificial Sequence
  Synthetic
EALEDFEKAAGA

SEQ ID NO: 6852 - protein, 12 aa, Artificial Sequence
  Synthetic
EALEDFEKAAGA

SEQ ID NO: 6853 - protein, 11 aa, Artificial Sequence
  Synthetic
YNPLEQCCDDG

SEQ ID NO: 6854 - protein, 12 aa, Artificial Sequence
  Synthetic
EDLLQEAQALAE

SEQ ID NO: 6855 - protein, 11 aa, Artificial Sequence
  Synthetic
LTDYGDQLPEV

SEQ ID NO: 6856 - protein, 12 aa, Artificial Sequence
  Synthetic
GALWDECCDCVG

SEQ ID NO: 6857 - protein, 12 aa, Artificial Sequence
  Synthetic
MGDCIGWLEDFL

SEQ ID NO: 6858 - protein, 12 aa, Artificial Sequence
  Synthetic
GVDGYVDNIEDL

SEQ ID NO: 6859 - protein, 11 aa, Artificial Sequence
  Synthetic
MDGYVDSIEDL

SEQ ID NO: 6860 - protein, 12 aa, Artificial Sequence
  Synthetic
AWEAMEELVDEG

1. An isolated peptide comprising an amino acid sequence selected from the group consisting of SEQ ID NO: 1-14, and an amino acid derived from anyone of SEQ ID NO: 1-14 with one amino acid substitution, wherein the peptide is not longer than 100 amino acid residues in length.

2. The isolated peptide of claim 1, wherein the peptide has antimicrobial activity.

3. The isolated peptide of claim 1, wherein the peptide comprises the amino acid sequence of anyone of SEQ ID NO: 1-14.

4. The isolated peptide of claim 1, wherein the peptide comprises the amino acid sequence of SEQ ID NO: 13 or 14.

5. The isolated peptide of claim 1, wherein the peptide is not longer than 75 amino acid residues in length.

6. The isolated peptide of claim 1, wherein the peptide is not longer than 60 amino acid residues in length.

7. An isolated peptide comprising an amino acid sequence of SEQ ID NO:19-6860 or an amino acid derived from a sequence of SEQ ID NO:19-6860 with one amino acid substitution, wherein the peptide is not longer than 100 amino acid residues in length.

8. A fusion peptide comprising a first fragment comprising the peptide of claim 7, and a second fragment having antimicrobial activity, wherein the fusion peptide is not longer than 100 amino acid residues in length.

9. The fusion peptide of claim 8, wherein the second fragment comprises a gamma-core motif comprising two anti-parallel β-sheets interposed by a short turn region with a GXC or CXG sequence pattern integrated into one of the β-sheets.

10. The fusion peptide of claim 9, wherein the gamma-core motif comprises CPTAQLIATLKNGRKICLDLQ (SEQ ID NO: 15) or a first amino acid sequence having at least 85% sequence identity to SEQ ID NO: 15.

11. The peptide of claim 1, comprising one or more non-natural amino acid residues.

12. A composition comprising the peptide of claim 1, and a pharmaceutically acceptable carrier.

13. The composition of claim 12, further comprising an antimicrobial agent.

14. The composition of claim 13, wherein the antimicrobial agent is selected from the group consisting of imipenem, ceftazidime, colistin, chloroquine, artemisinin, vancomycin and daptomycin.

15. A method of treating an infection in a patient in need thereof, comprising administering to the patient an effective amount of the composition of claim 12.

16. The method of claim 15, wherein the infection is caused by a Gram-negative bacterium, a Gram-positive bacterium or a fungus.

17. A computer-implemented method of identifying a peptide having antimicrobial activity, comprising:
identifying a consensus formula from aligned amino acid sequences known to have an antimicrobial activity;
tuning the consensus formula with a test search against a plurality of proteins with known antimicrobial activity; and
searching in a protein database, with one or more processors, for amino acid fragments matching the consensus formula, wherein the search takes as input one or more criteria selected from the group consisting of location of the fragment in a protein, size of the protein, organism of the protein, and signal peptide of the protein.

18. The method of claim 17, wherein the tuning comprising shortening the length of the consensus formula or changing substation options at one or more amino acid residues.

19. (canceled)
